(19) United States
(12) Patent Application Publication
(10) Pub. No.: US 2026/0021202 A1
(43) Pub. Date: Jan. 22, 2026

(54) COMPOSITIONS AND METHODS FOR TREATING NON-AGE-ASSOCIATED HEARING IMPAIRMENT IN A HUMAN SUBJECT

(71) Applicant: Akouos, Inc., Boston, MA (US)

(72) Inventors: Robert NG, Boston, MA (US); Jennifer WELLMAN, Boston, MA (US); Emmanuel John SIMONS, Boston, MA (US); William SEWELL, Boston, MA (US); Michelle VALERO, Boston, MA (US); Ann HICKOX, Boston, MA (US)

(21) Appl. No.: 18/866,969

(22) PCT Filed: May 19, 2023
(86) PCT No.: PCT/US2023/067220

§ 371 Date: Nov. 18, 2024

Related U.S. Application Data
(60) Provisional application No. 63/343,991, filed on May 19, 2022.

(51) Int. Cl. A61K 48/00; A61K 9/00; A61K 38/17; A61K 47/02; A61K 47/10; A61P 27/16; C07K 14/005; C12N 15/86

(52) U.S. Cl. CPC A61K 48/005; A61K 9/0046; A61K 38/1709; A61K 47/02; A61K 47/10; A61K 48/0075; A61K 48/0083; A61P 27/16; C07K 14/005; C12N 15/86; C12N 2750/14122; C12N 2750/14143; C12N 2800/40; C12N 2830/50

(57) ABSTRACT

Provided herein are compositions that comprise a) a first recombinant adeno-associated viral (rAAV) vector genome (vg) comprising a first expression cassette comprising a promoter operably linked to nucleic acid sequence comprising a 5′ portion of an otoferlin gene, wherein the expression cassette is flanked by inverted terminal repeats (ITRs); and b) a second rAAV vector genome comprising a second expression cassette comprising a nucleic acid sequence comprising a 3′ portion of an otoferlin gene, wherein the expression cassette is flanked by ITRs, wherein the composition comprises about 4.1E10-4.1E12 total vg or about 8.1E10-8.1E12 total vg, and the use of these compositions to treat hearing loss in a subject.

### CROSS-REFERENCE TO RELATED APPLICATIONS

[0001] This application claims the benefit of U.S. Provisional Application No. 63/343,991, filed May 19, 2022, which is hereby incorporated by reference in its entirety.

### SEQUENCE LISTING

[0002] The content of the electronically submitted sequence listing in XML format (Name: 4833.017PC02_Seqlisting_ST26.xml; Size: 816,150 bytes; and Date of Creation: May 17, 2023) filed with the application is incorporated herein by reference in its entirety.

### TECHNICAL FIELD

[0003] The present disclosure relates generally to the use of nucleic acids to treat hearing loss in a human subject.

### BACKGROUND OF THE DISCLOSURE

[0004] The ear is a complex organ, classically described as including the outer ear, the middle ear, the inner ear, the hearing (acoustic) nerve and the auditory system (which processes sound as it travels from the ear to the brain). In addition to detecting sound, the ear also helps to maintain balance. Thus, disorders of the inner ear can cause hearing loss, tinnitus, vertigo and imbalance.

[0005] Hearing loss is one of the most common human sensory deficits, and can occur for many reasons. Some people may be born with hearing loss while others may lose their hearing slowly over time. Presbycusis (also spelled presbyacusis) is age-related hearing loss. Approximately 36 million American adults report some degree of hearing loss, and one in three people older than 60 and half of those older than 85 experience hearing loss.

[0006] Hearing loss can be the result of environmental factors or a combination of genetic and environmental factors. About half of all people who have tinnitus—phantom noises in their auditory system (ringing, buzzing, chirping, humming, or beating)—also have an over-sensitivity to/reduced tolerance for certain sound frequency and volume ranges, known as hyperacusis (also spelled hyperacousis). Environmental causes of hearing loss include certain medications, specific infections before or after birth, and exposure to loud noise over an extended period. Hearing loss can result from noise, ototoxic agents, presbyacusis, disease, infection or cancers that affect specific parts of the ear.

[0007] Approximately 1.5 in 1,000 children are born with profound hearing loss, and another two to three per 1,000 children are born with partial hearing loss (Smith et al., 2005, Lancet 365:879-890). More than half of these cases are attributed to a genetic basis (Di Domenico, et al., 2011, J. Cell. Physiol. 226:2494-2499).

[0008] Nonsyndromic deafness is hearing loss that is not associated with other signs and symptoms. In contrast, syndromic deafness involves hearing loss that occurs with abnormalities in other parts of the body. Most cases of genetic deafness (70 percent to 80 percent) are nonsyndromic; the remaining cases are caused by specific genetic syndromes.

[0009] Hearing loss can be conductive (arising from the ear canal or middle ear), sensorineural (arising from the inner ear or auditory nerve), or mixed. Most forms of nonsyndromic deafness are associated with permanent hearing loss caused by damage to structures in the inner ear (sensorineural deafness). Some human sensorineural hearing loss is caused by abnormalities in the hair cells of the organ of Corti in the cochlea. There are also sensorineural hearing impairments that involve the eighth cranial nerve (the vestibulocochlear nerve) or the auditory portions of the brain. Most sensorineural hearing loss is due to poor hair cell function. The hair cells may be abnormal at birth, or damaged during the lifetime of an individual. There are both external causes of damage, like noise trauma and infection, and intrinsic abnormalities, like congenital mutations to genes that play an important role in cochlear anatomy or physiology.

[0010] Hearing loss that results from changes in the middle ear is called conductive hearing loss. Some forms of nonsyndromic deafness involve changes in both the inner ear and the middle ear, called mixed hearing loss. Hearing loss that is present before a child learns to speak is classified as prelingual or congenital. Hearing loss that occurs after the development of speech is classified as postlingual. Most autosomal recessive loci cause prelingual severe-to-profound hearing loss.

[0011] Nonsyndromic deafness can have different patterns of inheritance, and can occur at any age. Types of nonsyndromic deafness are named according to their inheritance patterns. Autosomal dominant forms are designated DFNA, autosomal recessive forms are DFNB, and X-linked forms are DFN. Each type is also numbered in the order in which it was described. For example, DFNA1 was the first described autosomal dominant type of nonsyndromic deafness.

[0012] Auditory neuropathy spectrum disorder (ANSD), a hearing disorder characterized by normal outer hair cells function and abnormal or absent auditory brain stem response, is one of the most common diseases leading to hearing and speech communication barriers in infants and young children. Approximately 10 percent of children with permanent hearing loss may have ANSD. The OTOF gene is the first gene identified for autosomal recessive non-syndromic ANSD, and mutations in OTOF have been found to account for approximately 5% of all cases of autosomal recessive nonsydromic hearing loss in some populations (Rodriguez-Ballesteros et al. 2008 Human Mut 29 (6): 823-831).

[0013] The causes of nonsyndromic deafness are complex. Researchers have identified more than 30 genes that, when altered, are associated with nonsyndromic deafness; however, some of these genes have not been fully characterized. Different mutations in the same gene can be associated with different types of hearing loss, and some genes are associated with both syndromic and nonsyndromic deafness.

[0014] For example, genes associated with nonsyndromic deafness include, but are not limited to, ATP2B2, ACTG1, CDH23, CLDN14, COCH, COL11A2, DFNA5, DFNB31, DFNB59, ESPN, EYA4, GJB3, KCNQ4, LHFPL5, MYO1A, MYO15A, MYO6,

[0015] MYO7A, OTOF, PCDH15, SLC26A4, STRC, TECTA, TMC1, TMIE, TMPRSS3, TRIOBP, USH1C, and WFS1.

[0016] OTOF-related deafness (DFNB9 nonsyndromic hearing loss) is characterized by two phenotypes: prelingual nonsyndromic hearing loss and, less frequently, temperature-sensitive nonsyndromic auditory neuropathy (TS-NSAN). Another form of progressive hearing impairment is associated with a mutation in the otoferlin gene (e.g., a I1573T mutation or a P1987R mutation, and/or a E1700Q mutation), or is not temperature sensitive.

[0017] Treatments for hearing loss currently consist of hearing amplification for mild to severe losses and cochlear implantation for severe to profound losses (Kral and O'Donoghue, 2010, N. Engl. J. Med. 363:1438-1450). To date, a majority of the research in this arena has focused on cochlear hair cell regeneration, applicable to the most common forms of hearing loss, including presbycusis, noise damage, infection, and ototoxicity.

[0018] A long-felt need remains for agents and methods for preventing or reversing deafness.

### BRIEF DESCRIPTION OF THE DRAWING

[0019] FIG. 1 is a schematic of the AAVAnc80-hOTOF construct comprising two recombinant vectors (AAVAnc80-5′hOTOF and AAVAnc80-3′hOTOF). The upstream DNA genome (AAVAnc80-5′hOTOF) includes a eukaryotic expression cassette encoding the following promoter and regulatory sequences: the cytomegalovirus (CMV) early enhancer element; the chicken beta actin (CBA) gene sequence located between 5′ flanking region and the proximal region of the second exon; and 3′ splice sequence derived from the rabbit beta globin (RBG) gene; the human OTOF (hOTOF) coding sequence, exons 1 through 21 (inclusive); a synthetic splice donor (SD); and a 77-base pair (bp) AK recombinogenic sequence. The downstream DNA genome (AAVAnc80-3′hOTOF) includes a eukaryotic expression cassette encoding the following: the same 77-bp AK recombinogenic sequence; a synthetic splice acceptor (SA); the human OTOF (hOTOF) coding sequence, exons 22 through 45 (inclusive) and exon 47, excluding non-coding exon 46; and the bovine growth hormone (bGH) polyadenylation (pA) signal. Each expression cassette is flanked by AAV2 inverted terminal repeats (ITRs). Abbreviations: AK=recombinogenic sequence; bGH=bovine growth hormone; CAG=the cytomegalovirus (CMV) early enhancer element, the promoter and the first exon of the chicken beta actin (CBA) gene, and a chimeric intron composed of the splice donor (SD) and the first intron of CBA and the splice acceptor (SA) sequence derived from the rabbit beta globin gene which together are commonly referred to as the CAG promoter; ITR=inverted terminal repeat; OTOF=otoferlin gene; pA=polyadenylation signal; SA=splice acceptor; SD=splice donor.

[0020] FIG. 2 illustrates a perspective of a device for delivering fluid to an inner ear, according to aspects of the present disclosure.

[0021] FIG. 3 illustrates a sideview of a bent needle sub-assembly, according to aspects of the present disclosure.

[0022] FIG. 4 illustrates a perspective view of a device for delivering fluid to an inner ear, according to aspects of the present disclosure.

[0023] FIG. 5 illustrates a perspective view of a bent needle sub-assembly coupled to the distal end of a device, according to aspects of the present disclosure.

[0024] FIGS. 6A-6C are immunohistochemical images of outer hair cells (OHCs) and inner hair cells (IHCs) in wildtype mice administered vehicle (FIG. 6A) or Otof^{-/-} mice administered vehicle (FIG. 6B) or AAVAnc80.AKhOTOF5 and AAVAnc80.AKhOTOF3 (FIG. 6C). Myo7a (green) is a marker for inner hair cells. Phalloidin (blue) is a marker for inner and outer hair cells. Otoferlin expression is shown in green. Co-localization of otoferlin with Myo7a in inner hair cells is shown in orange/yellow.

[0025] FIGS. 7A-7B are immunohistochemical images of outer hair cells (OHCs) and inner hair cells (IHCs) in wildtype non-human primates administered either vehicle (FIG. 7A) or AAVAnc80.AKhOTOF5 and AAVAnc80.AKhOTOF3-Flag (FIG. 7B). Flag is shown in yellow. Wildtype otoferlin expression is shown in pink. Phalloidin (blue) is a marker for inner and outer hair cells.

[0026] FIGS. 8A-8B are graphs showing auditory brainstem response (ABRs) in Otof^{-/-} mice 15, 30, 45, and 60 days (FIG. 8A) or 1, 2, 3, 4.5, or 6 months (FIG. 8B) post-administration of either vehicle or AAVAnc80.AKhOTOF5 and AAVAnc80.AKhOTOF3.

[0027] FIGS. 9A-9E are graphs showing the biodistribution of Otoferlin-Flag in non-human primates adminstered either vehicle, AAVAnc80.AKhOTOF5 and AAVAnc80.AKhOTOF3-Flag, or a spike-in control. Otoferlin-Flag mRNA levels in the mandibular lymph node (FIG. 9A), liver (FIG. 9B), and spleen (FIG. 9C) were measured by RT-qPCR. Otoferlin-Flag protein levels in the liver (FIG. 9D) and spleen (FIG. 9E) were measured by western blotting.

[0028] FIGS. 10A-10F are graphs showing the percent survival of inner and outer hair cells in non-human primates (FIGS. 10A-10B) or Otof−/− mice (FIGS. 10D-10E) adminstered either vehicle or AAVAnc80.AKhOTOF5 and AAVAnc80.AKhOTOF3. The cochlear regions evaluated are shown in FIGS. 10C and 10F.

[0029] FIGS. 11A-11B are graphs showing the auditory brainstem response (ABR) (FIG. 11A) or distortion product otoacoustic emission (DPOAE) (FIG. 11B) of non-human primates pre- and 6 months post-intracochlear administration of either vehicle or the AAVAnc80.AKhOTOF5 and AAVAnc80.AKhOTOF3-Flag.

### SUMMARY

[0030] Certain aspects of the disclosure are directed to a composition comprising: a) a first recombinant adeno-associated viral (rAAV) vector genome (vg) comprising a first expression cassette comprising a promoter operably linked to nucleic acid sequence comprising a 5′ portion of an otoferlin gene, wherein the expression cassette is flanked by inverted terminal repeats (ITRs); and b) a second rAAV vector genome comprising a second expression cassette comprising a nucleic acid sequence comprising a 3′ portion of an otoferlin gene, wherein the expression cassette is flanked by ITRs; wherein the composition comprises about 4.1E10-4.1E12 total vg or about 8.1E10-8.1E12 total vg.

[0031] In some aspects, the composition comprises about 4.1E10-4.1E12 total vg/cochlea total vg/cochlea. In some aspects the composition comprises about 4.1E11 total vg/cochlea. In other aspects, the composition comprises about 8.1E10-8.1E12 total vg/cochlea. In some aspects, the composition comprises about 8.1E11 total vg/cochlea.

[0032] In some aspects, the concentration of the composition comprises about 4.5E11-4.5E13 total vg/mL or about 9E11-9E13 total vg/mL. In some aspects, the concentration of the composition comprises about 4.5E11-4.5E13 total vg/mL. In some aspects, the concentration of the composition comprises about 4.5E12 total vg/mL In other aspects, the concentration of the composition comprises about 9E11-9E13 total vg/mL. In some aspects, the composition comprises about 9E12 total vg/mL In some aspects, the composition comprises the first rAAV vector genome and the second rAAV vector genome in about a 1:1 ratio.

[0033] In some aspects, the composition comprises about 4.1E11 total vg. In some aspects, the composition comprises about 8.1E11 total vg.

[0034] Certain aspects of the disclosure are directed to a composition comprising: a) a first rAAV vector genome comprising a first expression cassette comprising a promoter, a first coding sequence that encodes an N-terminal portion of an otoferlin protein positioned 3′ of the promoter, and a splicing donor signal sequence positioned at the 3′ end of the first coding sequence; and b) a second rAAV vector genome comprising a second expression cassette comprising a splicing acceptor signal sequence, a second coding sequence that encodes a C-terminal portion of an otoferlin protein positioned at the 3′ end of the splicing acceptor signal sequence, and a polyadenylation sequence at the 3′ end of the second coding sequence, wherein the composition is formulated for intra-cochlear administration.

[0035] In some aspects, the composition comprises one or more pharmaceutically acceptable carriers, diluents, or excipients. In some aspects, the composition is formulated to comprise a synthetic perilymph solution.

[0036] In some aspects, the composition comprises one or more buffering agents and one or more surfactants. In some aspects, the buffering agents are selected from monopotassium phosphate, sodium phosphate dibasic, potassium chloride, sodium chloride, Tris HCl, Tris base, histidine, boric acid, citric acid, glycine, HEPES, and MOPS. In some aspects, the surfactant is selected from poloxamer 188, labrasol, tween, ethanol, pluronic F68, and polyethyelene glycol. In some aspects, the composition comprises monopotassium phosphate, sodium phosphate dibasic, potassium chloride, sodium chloride, and Poloxamer 188.

[0037] In some aspects, the formulation comprises: a) about 1.35-1.65 mM monopotassium phosphate; b) about 7.29-8.91 mM sodium phosphate dibasic; c) about 2.43-2.97 mM potassium chloride; d) about 154.8-189.2 mM sodium chloride; and e) about 0.0001%-0.01% Poloxamer 188. In some aspects, the formulation comprises: a) about 1.5 mM monopotassium phosphate; b) about 8.1 mM sodium phosphate dibasic; c) about 2.7 mM potassium chloride; d) about 172 mM sodium chloride; and e) about 0.001% Poloxamer 188.

[0038] In some aspects, the composition comprises about 4.1E10-8.1E12 total vg/cochlea. In some aspects, the composition comprises about 4.1E10-4.1E12 total vg/cochlea or about 8.1E10-8.1E12 total vg/cochlea. In some aspects, the composition comprises about 4.1E11 total vg/cochlea. In other aspects, the composition comprises about 8.1E11 total vg/cochlea.

[0039] In some aspects, the concentration of the composition comprises about 4.5E11-4.5E13 total vg/mL. In some aspects, the concentration of the composition comprises about 4.5E12 total vg/mL. In other aspects, the concentration of the composition comprises about 9E11-9E13 total vg/mL. In some aspects, the concentration of the composition comprises about 9E12 total vg/mL.

[0040] In some aspects, the composition comprises the first rAAV vector genome and the second rAAV vector genome in about a 1:1 ratio.

[0041] In some aspects, the nucleic acid sequence comprising 5′ portion of the otoferlin gene has at least 80%, at least 85%, at least 90%, at least 91%, at least 92%, at least 93%, at least 94%, at least 95%, at least 96%, at least 97%, at least 98%, at least 99%, or 100% identity to SEQ ID NO: 101. In some aspects, the nucleic acid sequence comprising 3′ portion of the otoferlin gene has at least 70%, at least 75%, at least 80%, at least 85%, at least 90%, at least 91%, at least 92%, at least 93%, at least 94%, at least 95%, at least 96%, at least 97%, at least 98%, at least 99%, or 100% identity to SEQ ID NO: 107.

[0042] In some aspects, the promoter is selected from a constitutive promoter, an inducible promoter, or a tissue-specific promoter. In some aspects, the promoter is a constitutive promoter. In some aspects, the constitutive promoter is selected from a CAG, CBA, or CMV promoter. In some aspects, the constitutive promoter is a CAG promoter.

[0043] In some aspects, the first rAAV vector comprises a splicing donor site and a recombinogenic sequence. In some aspects, the second rAAV vector comprises a splicing acceptor site, a recombinogenic sequence, and a polyadenylation sequence.

[0044] In some aspects, the splicing donor site has a sequence with at least 70%, at least 75%, at least 80%, at least 85%, at least 90%, at least 91%, at least 92%, at least 93%, at least 94%, at least 95%, at least 96%, at least 97%, at least 98%, at least 99%, or 100% identity to SEQ ID NO: 102. In some aspects, the splicing acceptor site has a sequence with at least 70%, at least 75%, at least 80%, at least 85%, at least 90%, at least 91%, at least 92%, at least 93%, at least 94%, at least 95%, at least 96%, at least 97%, at least 98%, at least 99%, or 100% identity to SEQ ID NO: 106.

[0045] In some aspects, the recombinogenic sequence has a sequence with at least 70%, at least 75%, at least 80%, at least 85%, at least 90%, at least 91%, at least 92%, at least 93%, at least 94%, at least 95%, at least 96%, at least 97%, at least 98%, at least 99%, or 100% identity to SEQ ID NO: 103.

[0046] In some aspects, the polyadenylation sequence is selected from a bovine growth hormone, human growth hormone, mouse-β-globin, mouse-α-globin, polyomavirus, SV40, or synthetic polyadenylation sequence. In some aspects, the polyadenylation is a bovine growth hormone polyadenylation sequence. In some aspects, the polyadenylation sequence has a sequence with at least 70%, at least 75%, at least 80%, at least 85%, at least 90%, at least 91%, at least 92%, at least 93%, at least 94%, at least 95%, at least 96%, at least 97%, at least 98%, at least 99%, or 100% identity to SEQ ID NO: 108.

[0047] In some aspects, the ITRs are selected from any one of AAV1, AAV2, AAV3, AAV4, AAV5, AAV6, AAV7, AAV8, AAV9, AAVrh8, AAVrh10, AAVrh39, AAVrh43, or Anc80 ITRs. In some aspects, the ITRs are AAV2 ITRs.

[0048] In some aspects, the first expression cassette has a sequence with at least 70%, at least 75%, at least 80%, at least 85%, at least 90%, at least 91%, at least 92%, at least 93%, at least 94%, at least 95%, at least 96%, at least 97%, at least 98%, at least 99%, or 100% identity to SEQ ID NO: 96.

[0049] In some aspects, the second expression cassette has a sequence with at least 70%, at least 75%, at least 80%, at least 85%, at least 90%, at least 91%, at least 92%, at least 93%, at least 94%, at least 95%, at least 96%, at least 97%, at least 98%, at least 99%, or 100% identity to SEQ ID NO: 105.

[0050] In some aspects, the first and second rAAV vectors are each encapsulated by an AAV capsid. In some aspects, the AAV capsid encapsulating the first rAAV vector is a serotype selected from any one of AAV1, AAV2, AAV3, AAV4, AAV5, AAV6, AAV7, AAV8, AAV9, AAVrh8, AAVrh10, AAVrh39, AAVrh43, or Anc80. In some aspects, the AAV capsid encapsulating the second rAAV vector is a serotype selected from any one of AAV1, AAV2, AAV3, AAV4, AAV5, AAV6, AAV7, AAV8, AAV9, AAVrh8, AAVrh10, AAVrh39, AAVrh43, or Anc80. In some aspects, the first rAAV vector is encapsulated by an Anc80 capsid and the second rAAV vector is encapsulated by an Anc80 capsid. In some aspects, the Anc80 capsids comprise the polypeptide sequence of SEQ ID NO: 109.

[0051] In some aspects, the composition is formulated for intra-cochlear administration. In some aspects, the composition comprises one or more pharmaceutically acceptable carriers, diluents, or excipients. In some aspects, the composition is formulated to comprise a synthetic perilymph solution.

[0052] In some aspects, the composition comprises one or more buffering agents and one or more surfactants. In some aspects, the buffering agents are selected from monopotassium phosphate, sodium phosphate dibasic, potassium chloride, sodium chloride, Tris HCl, Tris base, histidine, boric acid, citric acid, glycine, HEPES, and MOPS. In some aspects, the surfactant is selected from poloxamer 188, labrasol, tween, ethanol, pluronic F68, and polyethyelene glycol. In some aspects, the composition comprises monopotassium phosphate, sodium phosphate dibasic, potassium chloride, sodium chloride, and Poloxamer 188.

[0053] In some aspects, the formulation comprises: a) about 1.35-1.65 mM monopotassium phosphate; b) about 7.29-8.91 mM sodium phosphate dibasic; c) about 2.43-2.97 mM potassium chloride; d) about 154.8-189.2 mM sodium chloride; and e) about 0.0001%-0.01% Poloxamer 188. In some aspects, the formulation comprises: a) about 1.5 mM monopotassium phosphate; b) about 8.1 mM sodium phosphate dibasic; c) about 2.7 mM potassium chloride; d) about 172 mM sodium chloride; and e) about 0.001% Poloxamer 188.

[0054] Certain aspects of the disclosure are directed to a method of treating hearing loss in a subject having a defective otoferlin gene, comprising administering a composition comprising: a) a first recombinant adeno-associated viral (rAAV) vector genome (vg) comprising a first expression cassette comprising a promoter operably linked to nucleic acid sequence comprising a 5′ portion of an otoferlin gene, wherein the expression cassette is flanked by inverted terminal repeats (ITRs); and b) a second rAAV vector genome comprising a second expression cassette comprising a nucleic acid sequence comprising a 3′ portion of an otoferlin gene, wherein the expression cassette is flanked by ITRs; wherein the composition comprises about 4.1E10-4.1E12 total vg or about 8.1E10-8.1E12 total vg, into the cochlea of the subject, wherein the first and second rAAV vectors are capable of constituting a polypeptide messenger RNA encoding a full length human otoferlin protein in the subject.

[0055] In some aspects, the method further comprises, prior to the administering step, determining that the subject has a defective otoferlin gene. In some aspects, the defective otoferlin gene comprises a mutation that results in a decrease in the expression and/or activity of an otoferlin protein encoded by the gene.

[0056] In some aspects, the method serves to mitigate or prevent secondary degeneration of one or more cochlear structures.

[0057] Certain aspects of the disclosure are directed to a method of expressing a recombinant full-length otoferlin protein in a mammalian cell, comprising administering a composition comprising: a) a first recombinant adeno-associated viral (rAAV) vector genome (vg) comprising a first expression cassette comprising a promoter operably linked to nucleic acid sequence comprising a 5′ portion of an otoferlin gene, wherein the expression cassette is flanked by inverted terminal repeats (ITRs); and b) a second rAAV vector genome comprising a second expression cassette comprising a nucleic acid sequence comprising a 3′ portion of an otoferlin gene, wherein the expression cassette is flanked by ITRs; wherein the composition comprises about 4.1E10-4.1E12 total vg or about 8.1E10-8.1E12 total vg, to the mammalian cell, wherein the first and second rAAV vectors are capable of constituting a polypeptide messenger RNA encoding a full length human otoferlin protein in the mammalian cell.

[0058] In some aspects, the mammalian cell is a cochlear cell. In some aspects, the mammalian cell is an inner ear hair cell. In some aspects, the subject is a mammal. In some aspects, the subject is a human.

[0059] In some aspects, the composition is administered in a single dose. In some aspects, the composition is administered in a plurality of doses. In some aspects, the composition is administered in 2, 3, 4, 5, 6, 7, 8, 9, or 10 doses.

[0060] In some aspects, a single dose comprises about 0.01 mL-0.2 mL. In some aspects, a single dose comprises about 0.09 mL.

[0061] In some aspects, the composition is administered as an injection to the round window membrane. In some aspects, the composition is administered in a single injection. In some aspects, the composition is administered in a plurality of injections. In some aspects, the composition is administered in 2, 3, 4, 5, 6, 7, 8, 9, or 10 injections.

[0062] In some aspects, the composition is administered through the use of a medical device. In some aspects, the device is a device as shown in FIGS. 2-5. In some aspects, the device is a microcatheter.

[0063] In some aspects, the composition is delivered at a controlled flow rate.

[0064] In some aspects, the subject is between 2 and 17 years of age.

[0065] In some aspects, the administration of the composition improves the subject's auditory brainstem response (ABR) threshold response, age-appropriate behavioral audiometry, tympanometry, and/or word/sentence recognition testing.

[0066] Certain aspects of the disclosure are directed to a kit comprising a composition comprising: a) a first recombinant adeno-associated viral (rAAV) vector genome (vg) comprising a first expression cassette comprising a promoter operably linked to nucleic acid sequence comprising a 5′ portion of an otoferlin gene, wherein the expression cassette is flanked by inverted terminal repeats (ITRs); and b) a second rAAV vector genome comprising a second expression cassette comprising a nucleic acid sequence comprising a 3′ portion of an otoferlin gene, wherein the expression cassette is flanked by ITRs; wherein the composition is formulated for intra-cochlear administration. Other aspects of the disclosure are directed to a kit comprising a composition comprising: a) a first rAAV vector genome comprising a first expression cassette comprising a promoter, a first coding sequence that encodes an N-terminal portion of an otoferlin protein positioned 3′ of the promoter, and a splicing donor signal sequence positioned at the 3′ end of the first coding sequence; and b) a second rAAV vector genome comprising a second expression cassette comprising a splicing acceptor signal sequence, a second coding sequence that encodes a C-terminal portion of an otoferlin protein positioned at the 3′ end of the splicing acceptor signal sequence, and a polyadenylation sequence at the 3′ end of the second coding sequence, wherein the composition is formulated for intra-cochlear administration.

[0067] In some aspects, the kit further comprises a pre-loaded syringe comprising the composition. In other aspects, the kit further comprises a vial comprising the composition.

[0068] Certain aspects of the disclosure are directed to a composition comprising: a) a first recombinant adeno-associated viral (rAAV) vector genome (vg) comprising a first expression cassette comprising a promoter operably linked to nucleic acid sequence comprising a 5′ portion of an otoferlin gene, wherein the expression cassette is flanked by inverted terminal repeats (ITRs); and b) a second rAAV vector genome comprising a second expression cassette comprising a nucleic acid sequence comprising a 3′ portion of an otoferlin gene, wherein the expression cassette is flanked by ITRs; wherein the composition comprises about 4.1E10-8.1E12 total vg.

[0069] In some aspects, the composition comprises about 4.1E10-4.1E12 total vg or about 8.1E10-8.1E12 total vg. In some aspects, the composition comprises about 4.1E10-4.1E12 total vg. In some aspects, the composition comprises about 4.1E11 total vg. In other aspects, the composition comprises about 8.1E10-8.1E12 total vg. In some aspects, the composition comprises about 8.1E11 total vg.

[0070] In some aspects, the composition comprises about 4.1E10-4.1E12 total vg/cochlea or about 8.1E10-8.1E12 total vg/cochlea. In some aspects, the composition comprises about 4.1E10-4.1E12 total vg/cochlea. In some aspects, the composition comprises about 4.1E11 total vg/cochlea. In other aspects, the composition comprises about 8.1E10-8.1E12 total vg/cochlea. In some aspects, the composition comprises about 8.1E11 total vg/cochlea.

[0071] In some aspects, the concentration of the composition comprises about 4.5E11-4.5E13 total vg/mL. In some aspects, the concentration of the composition comprises about 4.5E12 total vg/mL In other aspects, the concentration of the composition comprises about 9E11-9E13 total vg/mL. In some aspects, the composition comprises about 9E12 total vg/mL.

[0072] In some aspects, the composition comprises the first rAAV vector genome and the second rAAV vector genome in about a 1:1 ratio.

[0073] Certain aspects of the disclosure are directed to a composition comprising: a) a first recombinant adeno-associated viral (rAAV) vector genome (vg) comprising a first expression cassette comprising a promoter operably linked to nucleic acid sequence comprising a 5′ portion of an otoferlin gene, wherein the expression cassette is flanked by inverted terminal repeats (ITRs); and b) a second rAAV vector genome comprising a second expression cassette comprising a nucleic acid sequence comprising a 3′ portion of an otoferlin gene, wherein the expression cassette is flanked by ITRs; wherein the composition is formulated for intra-cochlear administration.

[0074] In some aspects, the composition comprises one or more pharmaceutically acceptable carriers, diluents, or excipients. In some aspects, the composition is formulated to comprise a synthetic perilymph solution.

[0075] In some aspects, the composition comprises one or more buffering agents and one or more surfactants. In some aspects, the buffering agents are selected from monopotassium phosphate, sodium phosphate dibasic, potassium chloride, sodium chloride, Tris HCl, Tris base, histidine, boric acid, citric acid, glycine, HEPES, and MOPS. In some aspects, the surfactant is selected from poloxamer 188, labrasol, tween, ethanol, pluronic F68, and polyethyelene glycol. In some aspects, the composition comprises monopotassium phosphate, sodium phosphate dibasic, potassium chloride, sodium chloride, and Poloxamer 188.

[0076] In some aspects, the formulation comprises: a) about 1.35-1.65 mM monopotassium phosphate; b) about 7.29-8.91 mM sodium phosphate dibasic; c) about 2.43-2.97 mM potassium chloride; d) about 154.8-189.2 mM sodium chloride; and e) about 0.0001%-0.01% Poloxamer 188. In some aspects, the formulation comprises: a) about 1.5 mM monopotassium phosphate; b) about 8.1 mM sodium phosphate dibasic; c) about 2.7 mM potassium chloride; d) about 172 mM sodium chloride; and e) about 0.001% Poloxamer 188.

[0077] In some aspects, the composition comprises about 4.1E10-8.1E12 total vg/cochlea. In some aspects, the composition comprises about 4.1E10-4.1E12 total vg/cochlea or about 8.1E10-8.1E12 total vg/cochlea. In some aspects, the composition comprises about 4.1E11 total vg/cochlea. In other aspects, the composition comprises about 8.1E11 total vg/cochlea.

[0078] In some aspects, the concentration of the composition comprises about 4.5E11-4.5E13 total vg/mL. In some aspects, the concentration of the composition comprises about 4.5E12 total vg/mL In other aspects, the concentration of the composition comprises about 9E11-9E13 total vg/mL. In some aspects, the concentration of the composition comprises about 9E12 total vg/mL.

[0079] In some aspects, the composition comprises the first rAAV vector genome and the second rAAV vector genome in about a 1:1 ratio.

[0080] In some aspects, the nucleic acid sequence comprising 5′ portion of the otoferlin gene has at least 80%, at least 85%, at least 90%, at least 91%, at least 92%, at least 93%, at least 94%, at least 95%, at least 96%, at least 97%, at least 98%, at least 99%, or 100% identity to SEQ ID NO: 101. In some aspects, the nucleic acid sequence comprising 3′ portion of the otoferlin gene has at least 70%, at least 75%, at least 80%, at least 85%, at least 90%, at least 91%, at least 92%, at least 93%, at least 94%, at least 95%, at least 96%, at least 97%, at least 98%, at least 99%, or 100% identity to SEQ ID NO: 107.

[0081] In some aspects, the promoter is selected from a constitutive promoter, an inducible promoter, or a tissue-specific promoter. In some aspects, the promoter is a constitutive promoter. In some aspects, the constitutive promoter is selected from a CAG, CBA, or CMV promoter. In some aspects, the constitutive promoter is a CAG promoter.

[0082] In some aspects, the first rAAV vector comprises a splicing donor site and a recombinogenic sequence. In some aspects, the second rAAV vector comprises a splicing acceptor site, a recombinogenic sequence, and a polyadenylation sequence.

[0083] In some aspects, the splicing donor site has a sequence with at least 70%, at least 75%, at least 80%, at least 85%, at least 90%, at least 91%, at least 92%, at least 93%, at least 94%, at least 95%, at least 96%, at least 97%, at least 98%, at least 99%, or 100% identity to SEQ ID NO: 102. In some aspects, the splicing acceptor site has a sequence with at least 70%, at least 75%, at least 80%, at least 85%, at least 90%, at least 91%, at least 92%, at least 93%, at least 94%, at least 95%, at least 96%, at least 97%, at least 98%, at least 99%, or 100% identity to SEQ ID NO: 106.

[0084] In some aspects, the recombinogenic sequence has a sequence with at least 70%, at least 75%, at least 80%, at least 85%, at least 90%, at least 91%, at least 92%, at least 93%, at least 94%, at least 95%, at least 96%, at least 97%, at least 98%, at least 99%, or 100% identity to SEQ ID NO: 103.

[0085] In some aspects, the polyadenylation sequence is selected from a bovine growth hormone, human growth hormone, mouse-β-globin, mouse-α-globin, polyomavirus, SV40, or synthetic polyadenylation sequence. In some aspects, the polyadenylation is a bovine growth hormone polyadenylation sequence. In some aspects, the polyadenylation sequence has a sequence with at least 70%, at least 75%, at least 80%, at least 85%, at least 90%, at least 91%, at least 92%, at least 93%, at least 94%, at least 95%, at least 96%, at least 97%, at least 98%, at least 99%, or 100% identity to SEQ ID NO: 108.

[0086] In some aspects, the ITRs are selected from any one of AAV1, AAV2, AAV3, AAV4, AAV5, AAV6, AAV7, AAV8, AAV9, AAVrh8, AAVrh10, AAVrh39, AAVrh43, or Anc80 ITRs. In some aspects, the ITRs are AAV2 ITRs.

[0087] In some aspects, the first expression cassette has a sequence with at least 70%, at least 75%, at least 80%, at least 85%, at least 90%, at least 91%, at least 92%, at least 93%, at least 94%, at least 95%, at least 96%, at least 97%, at least 98%, at least 99%, or 100% identity to SEQ ID NO: 96.

[0088] In some aspects, the second expression cassette has a sequence with at least 70%, at least 75%, at least 80%, at least 85%, at least 90%, at least 91%, at least 92%, at least 93%, at least 94%, at least 95%, at least 96%, at least 97%, at least 98%, at least 99%, or 100% identity to SEQ ID NO: 105.

[0089] In some aspects, the first and second rAAV vectors are each encapsulated by an AAV capsid. In some aspects, the AAV capsid encapsulating the first rAAV vector is a serotype selected from any one of AAV1, AAV2, AAV3, AAV4, AAV5, AAV6, AAV7, AAV8, AAV9, AAVrh8, AAVrh10, AAVrh39, AAVrh43, or Anc80. In some aspects, the AAV capsid encapsulating the second rAAV vector is a serotype selected from any one of AAV1, AAV2, AAV3, AAV4, AAV5, AAV6, AAV7, AAV8, AAV9, AAVrh8, AAVrh10, AAVrh39, AAVrh43, or Anc80. In some aspects, the first rAAV vector is encapsulated by an Anc80 capsid and the second rAAV vector is encapsulated by an Anc80 capsid. In some aspects, the Anc80 capsids comprise the polypeptide sequence of SEQ ID NO: 109.

[0090] In some aspects, the composition is formulated for intra-cochlear administration. In some aspects, the composition comprises one or more pharmaceutically acceptable carriers, diluents, or excipients. In some aspects, the composition is formulated to comprise a synthetic perilymph solution.

[0091] In some aspects, the composition comprises one or more buffering agents and one or more surfactants. In some aspects, the buffering agents are selected from monopotassium phosphate, sodium phosphate dibasic, potassium chloride, sodium chloride, Tris HCl, Tris base, histidine, boric acid, citric acid, glycine, HEPES, and MOPS. In some aspects, the surfactant is selected from poloxamer 188, labrasol, tween, ethanol, pluronic F68, and polyethyelene glycol. In some aspects, the composition comprises monopotassium phosphate, sodium phosphate dibasic, potassium chloride, sodium chloride, and Poloxamer 188.

[0092] In some aspects, the formulation comprises: a) about 1.35-1.65 mM monopotassium phosphate; b) about 7.29-8.91 mM sodium phosphate dibasic; c) about 2.43-2.97 mM potassium chloride; d) about 154.8-189.2 mM sodium chloride; and e) about 0.0001%-0.01% Poloxamer 188. In some aspects, the formulation comprises: a) about 1.5 mM monopotassium phosphate; b) about 8.1 mM sodium phosphate dibasic; c) about 2.7 mM potassium chloride; d) about 172 mM sodium chloride; and e) about 0.001% Poloxamer 188.

[0093] In some aspects, the formulation is a sterile suspension. In some aspects, the formulation comprises sterile water.

[0094] In some aspects, the volume of the formulation is about 0.01 mL to 0.2 mL. In some aspects, the volume of the formulation is about 0.09 mL.

[0095] Certain aspects of the disclosure are directed to a method of treating hearing loss in a subject having a defective otoferlin gene, comprising administering a composition comprising: a) a first recombinant adeno-associated viral (rAAV) vector genome (vg) comprising a first expression cassette comprising a promoter operably linked to nucleic acid sequence comprising a 5′ portion of an otoferlin gene, wherein the expression cassette is flanked by inverted terminal repeats (ITRs); and b) a second rAAV vector genome comprising a second expression cassette comprising a nucleic acid sequence comprising a 3′ portion of an otoferlin gene, wherein the expression cassette is flanked by ITRs; wherein the composition comprises about 4.1E10-8.1E12 total vg, into the cochlea of the subject, wherein the first and second rAAV vectors are capable of constituting a polypeptide messenger RNA encoding a full length human otoferlin protein in the subject. Other aspects of the disclosure are directed to a method of treating hearing loss in a subject having a defective otoferlin gene, comprising administering a composition comprising: a) a first recombinant adeno-associated viral (rAAV) vector genome (vg) comprising a first expression cassette comprising a promoter operably linked to nucleic acid sequence comprising a 5′ portion of an otoferlin gene, wherein the expression cassette is flanked by inverted terminal repeats (ITRs); and b) a second rAAV vector genome comprising a second expression cassette comprising a nucleic acid sequence comprising a 3′ portion of an otoferlin gene, wherein the expression cassette is flanked by ITRs; wherein the composition is formulated for intra-cochlear administration, into the cochlea of the subject, wherein the first and second rAAV vectors are capable of constituting a polypeptide messenger RNA encoding a full length human otoferlin protein in the subject.

[0096] In some aspects, the defective otoferlin gene comprises a mutation that results in a decrease in the expression and/or activity of an otoferlin protein encoded by the gene. In some aspects, the method further comprises, prior to the administering step, determining that the subject has a defective otoferlin gene.

[0097] Certain aspects of the disclosure are directed to a method of treating hearing loss in a subject having biallelic otoferlin gene mutations, comprising administering a composition comprising: a) a first recombinant adeno-associated viral (rAAV) vector genome (vg) comprising a first expression cassette comprising a promoter operably linked to nucleic acid sequence comprising a 5′ portion of an otoferlin gene, wherein the expression cassette is flanked by inverted terminal repeats (ITRs); and b) a second rAAV vector genome comprising a second expression cassette comprising a nucleic acid sequence comprising a 3′ portion of an otoferlin gene, wherein the expression cassette is flanked by ITRs; wherein the composition comprises about 4.1E10-8.1E12 total vg, into the cochlea of the subject, wherein the first and second rAAV vectors are capable of constituting a polypeptide messenger RNA encoding a full length human otoferlin protein in the subject. Other aspects of the disclosure are directed to a method of treating hearing loss in a subject having biallelic otoferlin gene mutations, comprising administering a composition comprising: a) a first recombinant adeno-associated viral (rAAV) vector genome (vg) comprising a first expression cassette comprising a promoter operably linked to nucleic acid sequence comprising a 5′ portion of an otoferlin gene, wherein the expression cassette is flanked by inverted terminal repeats (ITRs); and b) a second rAAV vector genome comprising a second expression cassette comprising a nucleic acid sequence comprising a 3′ portion of an otoferlin gene, wherein the expression cassette is flanked by ITRs; wherein the composition is formulated for intra-cochlear administration, into the cochlea of the subject, wherein the first and second rAAV vectors are capable of constituting a polypeptide messenger RNA encoding a full length human otoferlin protein in the subject.

[0098] In some aspects, the method further comprises, prior to the administering step, determining that the subject has biallelic otoferlin gene mutations.

[0099] In some aspects, the the subject has a clinical presentation of bilateral profound sensorineural hearing loss. In some aspects, the subject has the clinical presentation of the bilateral profound sensorineural hearing loss when afebrile.

[0100] In some aspects, the method serves to mitigate or prevent secondary degeneration of one or more cochlear structures. In some aspects, the subject has preserved distortion product otoacoustic emissions (DPOAEs).

[0101] Certain aspects of the disclosure are directed to a method of expressing a recombinant full-length otoferlin protein in a mammalian cell, comprising administering a composition comprising: a) a first recombinant adeno-associated viral (rAAV) vector genome (vg) comprising a first expression cassette comprising a promoter operably linked to nucleic acid sequence comprising a 5′ portion of an otoferlin gene, wherein the expression cassette is flanked by inverted terminal repeats (ITRs); and b) a second rAAV vector genome comprising a second expression cassette comprising a nucleic acid sequence comprising a 3′ portion of an otoferlin gene, wherein the expression cassette is flanked by ITRs; wherein the composition comprises about 4.1E10-8.1E12 total vg, to the mammalian cell, wherein the first and second rAAV vectors are capable of constituting a polypeptide messenger RNA encoding a full length human otoferlin protein in the mammalian cell. Other aspects of the disclosure are directed to a method of expressing a recombinant full-length otoferlin protein in a mammalian cell, comprising administering a composition comprising: a) a first recombinant adeno-associated viral (rAAV) vector genome (vg) comprising a first expression cassette comprising a promoter operably linked to nucleic acid sequence comprising a 5′ portion of an otoferlin gene, wherein the expression cassette is flanked by inverted terminal repeats (ITRs); and b) a second rAAV vector genome comprising a second expression cassette comprising a nucleic acid sequence comprising a 3′ portion of an otoferlin gene, wherein the expression cassette is flanked by ITRs; wherein the composition is formulated for intra-cochlear administration, to the mammalian cell, wherein the first and second rAAV vectors are capable of constituting a polypeptide messenger RNA encoding a full length human otoferlin protein in the mammalian cell.

[0102] In some aspects, the mammalian cell is a cochlear cell. In some aspects, the mammalian cell is an inner ear hair cell. In some aspects, the subject is a mammal. In some aspects, the subject is a human.

[0103] In some aspects, the composition is administered in a single dose. In some aspects, the composition is administered in a plurality of doses. In some aspects, the composition is administered in 2, 3, 4, 5, 6, 7, 8, 9, or 10 doses.

[0104] In some aspects, a single dose comprises about 0.01 mL-0.2 mL. In some aspects, a single dose comprises about 0.09 mL.

[0105] In some aspects, the composition is administered as an injection to the round window membrane. In some aspects, the composition is administered in a single injection. In some aspects, the composition is administered in a plurality of injections. In some aspects, the composition is administered in 2, 3, 4, 5, 6, 7, 8, 9, or 10 injections.

[0106] In some aspects, the composition is administered through the use of a medical device. In some aspects, the composition is pre-loaded in the device. In some aspects, the device is a device as shown in FIGS. 2-5. In some aspects, the device is a microcatheter. In some aspects, the microcatheter is shaped such that it can enter the middle ear cavity via the external auditory canal and contact the end of the microcatheter with the round window membrane (RWM). In some aspects, a distal end of the microcatheter comprises at least one microneedle with diameter of between 10 and 1,000 microns. In some aspects, the at least one microneedle comprises a bent portion and an angled tip.

[0107] In some aspects, the composition is delivered at a controlled flow rate.

[0108] In some aspects, the subject is between 2 and 17 years of age.

[0109] In some aspects, the administration of the composition improves the subject's auditory brainstem response (ABR) threshold response, age-appropriate behavioral audiometry, tympanometry, and/or word/sentence recognition testing.

[0110] Certain aspects of the disclosure are directed to a kit comprising a composition comprising: a) a first recombinant adeno-associated viral (rAAV) vector genome (vg) comprising a first expression cassette comprising a promoter operably linked to nucleic acid sequence comprising a 5′ portion of an otoferlin gene, wherein the expression cassette is flanked by inverted terminal repeats (ITRs); and b) a second rAAV vector genome comprising a second expression cassette comprising a nucleic acid sequence comprising a 3′ portion of an otoferlin gene, wherein the expression cassette is flanked by ITRs; wherein the composition comprises about 4.1E10-8.1E12 total vg. Other aspects of the disclosure are directed to a kit comprising a composition comprising: a) a first recombinant adeno-associated viral (rAAV) vector genome (vg) comprising a first expression cassette comprising a promoter operably linked to nucleic acid sequence comprising a 5′ portion of an otoferlin gene, wherein the expression cassette is flanked by inverted terminal repeats (ITRs); and b) a second rAAV vector genome comprising a second expression cassette comprising a nucleic acid sequence comprising a 3′ portion of an otoferlin gene, wherein the expression cassette is flanked by ITRs; wherein the composition is formulated for intra-cochlear administration.

[0111] In some aspects, the composition is pre-loaded into a device. In some aspects, the device is a microcatheter. In some aspects, the microcatheter is shaped such that it can enter the middle ear cavity via the external auditory canal and contact the end of the microcatheter with the round window membrane (RWM). In some aspects, a distal end of the microcatheter is comprised of at least one microneedle with diameter of between 10 and 1,000 microns.

[0112] In some aspects, the kit further comprises a device. In some aspects, the device is a device described in any one of FIGS. 2-5. In some aspects, the device comprises a needle comprising a bent portion and an angled tip.

[0113] In some aspects, the kit further comprises a vial comprising the composition. In some aspects, the vial is a single-use vial. In some aspects, the kit further comprises a second vial comprising a diluent.

### DETAILED DESCRIPTION

[0114] Unless defined otherwise, all technical and scientific terms used herein have the same meaning as commonly understood by one of ordinary skill in the art to which the disclosure pertains.

[0115] The terms “a” and “an” refer to one or to more than one (i.e., at least one) of the grammatical object of the article. By way of example, “an element” encompasses one element and more than one element.

[0116] The term “about” is used herein to mean approximately, roughly, around, or in the regions of. When the term “about” is used in conjunction with a numerical range, it modifies that range by extending the boundaries above and below the numerical values set forth. In general, the term “about” is used herein to modify a numerical value above and below the stated value by a variance of 10 percent, up or down (higher or lower), unless indicated otherwise.

[0117] The term “recombinant polypeptide” or “recombinant protein” refers to a polypeptide or protein which is generated using recombinant DNA technology, such as, for example, a polypeptide or protein expressed by a viral vector expression system. The term should also be construed to mean a polypeptide or protein which has been generated by the synthesis of a DNA molecule encoding the polypeptide or protein and which DNA molecule expresses a protein, or an amino acid sequence specifying the polypeptide, wherein the DNA or amino acid sequence has been obtained using recombinant DNA or amino acid sequence technology which is available and well known in the art.

[0118] The term “mutation in an otoferlin gene” refers to a modification in a wildtype otoferlin gene that results in the production of an otoferlin protein having one or more of: a deletion of one or more amino acids, one or more amino acid substitutions, and one or more amino acid insertions, as compared to the wildtype otoferlin protein, and/or results in a decrease in the expressed level of the encoded otoferlin protein in a mammalian cell as compared to the expressed level of the encoded otoferlin protein in a mammalian cell not having the mutation. In some aspects, a mutation can result in the production of an otoferlin protein having a deletion of one or more amino acids (e.g., 2, 3, 4, 5, 6, 7, 8, 9, 10, 11, 12, 13, 14, 15 16, 17, 18, 19, or 20 amino acids). In some aspects, the mutation can result in a frameshift in the otoferlin gene. The term “frameshift” is known in the art to encompass any mutation in a coding sequence that results in a shift in the reading frame of the coding sequence. In some aspects, a frameshift can result in a nonfunctional protein. In some aspects, a point mutation can be a nonsense mutation (i.e., result in a premature stop codon in an exon of the gene). A nonsense mutation can result in the production of a truncated protein (as compared to a corresponding wildtype protein) that may or may not be functional. In some aspects, the mutation can result in the loss (or a decrease in the level) of expression of otoferlin mRNA or otoferlin protein or both the mRNA and protein. In some aspects, the mutation can result in the production of an altered otoferlin protein having a loss or decrease in one or more biological activities (functions) as compared to a wildtype otoferlin protein.

[0119] In some aspects, the mutation is an insertion of one or more nucleotides into an otoferlin gene. In some aspects, the mutation is in a regulatory sequence of the otoferlin gene, i.e., a portion of the gene that is not coding sequence. In some aspects, a mutation in a regulatory sequence may be in a promoter or enhancer region and prevent or reduce the proper transcription of the otoferlin gene.

[0120] Modifications can be introduced into a nucleotide sequence by standard techniques known in the art, such as site-directed mutagenesis and PCR-mediated mutagenesis.

[0121] The term “conservative sequence modifications” refers to amino acid modifications that do not significantly affect or alter the binding characteristics of the antibody or antibody fragment containing the amino acid sequence. Such conservative modifications include amino acid substitutions, additions, and deletions. Modifications can be introduced into an antibody or antibody fragment of the disclosure by standard techniques known in the art, such as site-directed mutagenesis and PCR-mediated mutagenesis. Conservative amino acid substitutions are ones in which the amino acid residue is replaced with an amino acid residue having a similar side chain. Families of amino acid residues having similar side chains have been defined in the art. These families include amino acids with basic side chains (e.g., lysine, arginine, and histidine), acidic side chains (e.g., aspartic acid and glutamic acid), uncharged polar side chains (e.g., glycine, asparagine, glutamine, serine, threonine, tyrosine, cysteine, and tryptophan), nonpolar side chains (e.g., alanine, valine, leucine, isoleucine, proline, phenylalanine, and methionine), beta-branched side chains (e.g., threonine, valine, and isoleucine), and aromatic side chains (e.g., tyrosine, phenylalanine, tryptophan, and histidine).

[0122] The term “encoding” refers to the inherent property of specific sequences of nucleotides in a polynucleotide, such as a gene, a cDNA, or an mRNA, to serve as templates for synthesis of a defined sequence of amino acids, in accordance with the genetic code. Thus, a gene, cDNA, or RNA encodes a protein if transcription and translation of mRNA corresponding to that gene, cDNA or RNA produces the protein. Both the coding strand, the nucleotide sequence of which is identical to the mRNA sequence and is usually provided in sequence listings, and the non-coding strand, used as the template for transcription, can be referred to as encoding the protein product.

[0123] The term “sequence identity” is used herein to mean a relationship between two or more amino acid (polypeptide or protein) sequences or two or more nucleic acid (polynucleotide) sequences, as determined by comparing the sequences. In certain aspects, sequence identity is calculated based on the full length of two given SEQ ID NO or on part thereof. Part thereof can mean at least 10%, 20%, 30%, 40%, 50%, 60%, 70%, 80%, 90%, or 100% of both SEQ ID NO, or any other specified percentage. The term “identity” can also mean the degree of sequence relatedness between amino acid or nucleic acid sequences, as the case may be, as determined by the match between strings of such sequences.

[0124] Unless otherwise specified, a “nucleotide sequence encoding an amino acid sequence” includes all nucleotide sequences that are degenerate versions of each other and thus encode the same amino acid sequence. A nucleotide sequence that encodes a protein may also include introns.

[0125] The term “isolated” means altered or removed from the natural state. For example, a nucleic acid or a peptide naturally present in a living animal is not “isolated,” but the same nucleic acid or peptide partially or completely separated from the coexisting materials of its natural state is “isolated.” An isolated nucleic acid or protein can exist in substantially purified form, or can exist in a non-native environment such as, for example, a host cell.

[0126] The term “transfected” or “transformed” or “transduced” refers to a process by which exogenous nucleic acid is transferred or introduced into the host cell. A “transfected” or “transformed” or “transduced” cell is one which has been transfected, transformed or transduced with exogenous nucleic acid. The cell includes the primary subject cell and its progeny.

[0127] The term “expression” refers to the transcription and/or translation of a particular nucleotide sequence driven by a promoter.

[0128] As used herein, “transient” refers to expression of a non-integrated transgene for a period of hours, days or weeks, wherein the period of time of expression is less than the period of time for expression of the gene if integrated into the genome or contained within a stable plasmid replicon in the host cell.

[0129] The term “subject” is intended to include living organisms in which an immune response can be elicited (e.g., mammals, human). In some aspects, the subject is a rodent (e.g., a rat or mouse), a rabbit, a sheep, a dog, a cat, a horse, a non-human primate, or a human. In some aspects, the subject has or is at risk of developing non-syndromic deafness. In some aspects, the subject has been previously identified as having a mutation in an otoferlin gene. In some aspects, the subject has been identified as having a mutation in an otoferlin gene and has been diagnosed with non-syndromic sensorineural hearing loss. In some aspects, the subject has been identified as having non-syndromic sensorineural hearing loss.

[0130] The term “therapeutic” as used herein means a treatment. A therapeutic effect is obtained by reduction, suppression, remission, or eradication of a disease state.

[0131] The term “prophylaxis” as used herein means the prevention of, or protective treatment for, a disease or disease state. “Prevention” in this context includes reducing the likelihood the subject will experience the disease.

[0132] The term “effective amount” or “therapeutically effective amount” are used interchangeably herein, and refer to an amount of a compound, formulation, material, or composition as described herein effective to achieve a particular biological result. In some aspects, a therapeutically effective amount of a composition can result in an increase in the expression level of an active otoferlin protein (e.g., a wildtype, full-length otoferlin protein or of a variant of an otoferlin protein that has the desired activity) (e.g., as compared to the expression level prior to treatment with the composition). In some aspects, a therapeutically effective amount of a composition can result in an increase in the expression level of an active otoferlin protein (e.g., a wildtype, full-length otoferlin protein or active variant) in a target cell (e.g., a cochlear inner hair cell). In some aspects, a therapeutically effective amount of a composition can result in a different cellular localization of an active otoferlin protein (e.g., a wildtype, full-length otoferlin protein or an active variant) in a target cell (e.g., a cochlear inner hair cell). In some aspects, a therapeutically effective amount of a composition can result in an increase in the expression level of an active otoferlin protein (e.g., a wildtype, full-length otoferlin protein or active variant), and/or an increase in one or more activities of an otoferlin protein in a target cell (e.g., as compared to a reference level, such as the level(s) in a subject prior to treatment, the level(s) in a subject having a mutation in an otoferlin gene, or the level(s) in a subject or a population of subjects having non-syndromic sensorineural hearing loss).

[0133] The term “parenteral” administration of a composition includes, e.g., subcutaneous (s.c.), intravenous (i.v.), intramuscular (i.m.), or intrasternal injection, or infusion techniques.

[0134] The term “nucleic acid” or “polynucleotide” refers to deoxyribonucleic acids (DNA) or ribonucleic acids (RNA) and polymers thereof in either single- or double-stranded form. Unless specifically limited, the term encompasses nucleic acids containing known analogues of natural nucleotides that have similar binding properties as the reference nucleic acid and are metabolized in a manner similar to naturally occurring nucleotides. Unless otherwise indicated, a particular nucleic acid sequence also implicitly encompasses conservatively modified variants thereof (e.g., degenerate codon substitutions), alleles, orthologs, SNPs, and complementary sequences as well as the sequence explicitly indicated. Specifically, degenerate codon substitutions may be achieved by generating sequences in which the third position of one or more selected (or all) codons is substituted with mixed-base and/or deoxyinosine residues (Batzer et al., Nucleic Acid Res. 19:5081 (1991); Ohtsuka et al., J. Biol. Chem. 260:2605-2608 (1985); and Rossolini et al., Mol. Cell. Probes 8:91-98 (1994)).

[0135] In some aspects of any of the nucleic acids described herein, the nucleic acid is DNA. In some aspects of any of the nucleic acids described herein, the nucleic acid is RNA.

[0136] In the context of the present disclosure, the following abbreviations for the commonly occurring nucleic acid bases are used. “A” refers to adenosine, “C” refers to cytosine, “G” refers to guanosine, “T” refers to thymidine, and “U” refers to uridine.

[0137] As used herein, “in vitro transcribed RNA” refers to RNA, preferably mRNA, that has been synthesized in vitro. Generally, the in vitro transcribed RNA is generated from an in vitro transcription vector. The in vitro transcription vector includes a template that is used to generate the in vitro transcribed RNA.

[0138] The terms “peptide,” “polypeptide,” and “protein” are used interchangeably, and refer to a compound comprised of amino acid residues covalently linked by peptide bonds. A protein or peptide must contain at least two amino acids, and no limitation is placed on the maximum number of amino acids that can comprise a protein's or peptide's sequence. Polypeptides include any peptide or protein including two or more amino acids joined to each other by peptide bonds. As used herein, the term refers to both short chains, which also commonly are referred to in the art as peptides, oligopeptides and oligomers, for example, and to longer chains, which generally are referred to in the art as proteins, of which there are many types. “Polypeptides” include, for example, biologically active fragments, substantially homologous polypeptides, oligopeptides, homodimers, heterodimers, variants of polypeptides, modified polypeptides, derivatives, analogs, fusion proteins, among others. A polypeptide includes a natural peptide, a recombinant peptide, or a combination thereof.

[0139] The term “active otoferlin protein” means a protein encoded by DNA that, if substituted for both wildtype alleles encoding full-length otoferlin protein in auditory hair cells (e.g., auditory inner hair cells) of what is otherwise a wildtype mammal, and if expressed in the auditory hair cells of that mammal, results in that mammal's having a level of hearing approximating the normal level of hearing of a similar mammal that is entirely wildtype. Non-limiting examples of active otoferlin proteins are full-length otoferlin proteins (e.g., any of the full-length otoferlin proteins described herein).

[0140] The term “vector” includes any genetic element, such as a plasmid, phage, transposon, cosmid, chromosome, artificial chromosome, virus, virion, etc., that is capable of replication when associated with the proper control elements and that can transfer gene sequences between cells. Thus, the term includes cloning and expression vehicles, as well as viral vectors. In some aspects, useful vectors are contemplated to be those vectors in which the nucleic acid segment to be transcribed is positioned under the transcriptional control of a promoter.

[0141] Vectors include all those known in the art, including cosmids, plasmids (e.g., naked or contained in liposomes) and viruses (e.g., lentiviruses, retroviruses, adenoviruses, and adeno-associated viruses) that incorporate the recombinant polynucleotide. Skilled practitioners will be capable of selecting suitable vectors and mammalian cells for making any of the nucleic acids described herein. A vector can, e.g., include sufficient cis-acting elements for expression; other elements for expression can be supplied by the host mammalian cell or in an in vitro expression system.

[0142] A “promoter” refers to a DNA sequence recognized by the synthetic machinery of the cell, or introduced synthetic machinery, required to initiate the specific transcription of a polynucleotide sequence (e.g., a gene).

[0143] The term “expression vector,” “construct,” or “expression cassette” means any type of genetic construct containing a nucleic acid in which part or all of the nucleic acid coding sequence is capable of being transcribed. In some aspects, expression includes transcription of the nucleic acid, for example, to generate a biologically-active polypeptide product or inhibitory RNA (e.g., shRNA, miRNA, miRNA inhibitor) from a transcribed gene.

[0144] The term “operably linked,” “operatively positioned,” “operatively linked,” “under control,” “under transcriptional control,” or “transcriptional control” refers to functional linkage between a regulatory sequence and a heterologous nucleic acid sequence resulting in expression of the latter. For example, a first nucleic acid sequence is operably linked with a second nucleic acid sequence when the first nucleic acid sequence is placed in a functional relationship with the second nucleic acid sequence. For instance, a promoter is operably linked to a coding sequence if the promoter affects the transcription or expression of the coding sequence. Operably linked DNA sequences can be contiguous with each other and, e.g., where necessary to join two protein coding regions, are in the same reading frame.

[0145] The term “constitutive” promoter refers to a nucleotide sequence that, when operably linked with a nucleic acid encoding a protein (e.g., an otoferlin protein), causes RNA to be transcribed from the nucleic acid in a mammalian cell under most or all physiological conditions.

[0146] The term “inducible” promoter refers to a nucleotide sequence which, when operably linked with a polynucleotide which encodes or specifies a gene product, causes the gene product to be produced in a cell substantially only when an inducer which corresponds to the promoter is present in the cell.

[0147] The term “tissue-specific” promoter refers to a promoter that is active only in certain specific cell types and/or tissues (e.g., transcription of a specific gene occurs only within cells expressing transcription regulatory proteins that bind to the tissue-specific promoter).

[0148] As used herein, “polyadenylation” refers to the covalent linkage of a polyadenylyl moiety, or its modified variant, to a messenger RNA molecule. In eukaryotic organisms, most messenger RNA (mRNA) molecules are polyadenylated at the 3′ end. The 3′ poly(A) tail is a long sequence of adenine nucleotides (often several hundred) added to the pre-mRNA through the action of an enzyme, polyadenylate polymerase. In higher eukaryotes, the poly(A) tail is added onto transcripts that contain a specific sequence, the polyadenylation signal. The poly(A) tail and the protein bound to it aid in protecting mRNA from degradation by exonucleases. Polyadenylation is also important for transcription termination, export of the mRNA from the nucleus, and translation. Polyadenylation occurs in the nucleus immediately after transcription of DNA into RNA, but additionally can also occur later in the cytoplasm. After transcription has been terminated, the mRNA chain is cleaved through the action of an endonuclease complex associated with RNA polymerase. The cleavage site is usually characterized by the presence of the base sequence AAUAAA near the cleavage site. After the mRNA has been cleaved, adenosine residues are added to the free 3′ end at the cleavage site.

[0149] As used herein, a “poly(A),” “poly(A) signal sequence,” “polyA sequence,” or “polyadenylation sequence” is a sequence that triggers the endonuclease cleavage of an mRNA and the additional of a series of adenosines to the 3′ end of the cleaved mRNA.

[0150] As used herein, the term “pharmaceutically acceptable carrier” includes buffering agents, surfactants, salts, solvents, dispersion media, coatings, antibacterial agents, antifungal agents, and the like that are compatible with pharmaceutical administration. Supplementary active compounds can also be incorporated into any of the compositions described herein.

[0151] As used herein, “carrier” includes any and all buffering agents, surfactants, salts, solvents, dispersion media, vehicles, coatings, diluents, antibacterial and antifungal agents, isotonic and absorption delaying agents, buffers, carrier solutions, suspensions, colloids, and the like. The use of such media and agents for pharmaceutical active substances is well known in the art. Supplementary active ingredients can also be incorporated into the compositions.

[0152] A “viral genome” or “vector genome” or “viral vector” refers to a sequence that comprises one or more polynucleotide regions encoding or comprising a molecule of interest, e.g., a protein, a peptide, and a polynucleotide or a plurality thereof. Viral vectors are used to deliver genetic materials into cells. Viral vectors can be modified for specific applications. In some aspects, the delivery vectors comprises a viral vector selected from the group consisting of an adeno-associated viral (AAV) vector, an adenoviral vector, a lentiviral vector, or a retroviral vector.

[0153] The term “adeno-associated virus vector” or “AAV vector” as used herein refers to any vector which comprises or derives from components of an adeno-associated vector and is suitable to infect mammalian cells, preferably human cells. The term AAV vector typically designates an AAV-type viral particle or virion comprising a payload. The AAV vector can be derived from various serotypes, including combinations of serotypes (i.e., “pseudotyped” AAV) or from various genomes (e.g., single stranded or self-complementary). In addition, the AAV vector can be replication defective and/or targeted. As used herein, the term “adeno-associated virus” (AAV), includes but is not limited to, AAV type 1, AAV type 2, AAV type 3 (including types 3A and 3B), AAV type 4, AAV type 5, AAV type 6, AAV type 7, AAV type 8, AAV type 9, AAV type 10, AAV type 11, AAV type 12, AAV type 13, AAVrh8, AAVrh10, AAVrh.74, snake AAV, avian AAV, bovine AAV, canine AAV, equine AAV, ovine AAV, goat AAV, shrimp AAV, those AAV serotypes and clades disclosed by Gao et al. (J. Virol. 78:6381 (2004)) and Moris et al. (Virol. 33:375 (2004)), and any other AAV. See, e.g., FIELDS et al. VIROLOGY, volume 2, chapter 69 (4th ed., Lippincott-Raven Publishers). In some aspects, an “AAV vector” includes a derivative of a known AAV vector. In some aspects, an “AAV vector” includes a modified or an artificial AAV vector. The terms “AAV genome” and “AAV vector” can be used interchangeably.

[0154] As used herein, a “recombinant AAV particle” or “rAAV particle” is an AAV virus that comprises a capsid protein and an AAV vector having at least one payload region and at least one inverted terminal repeat (ITR) region.

[0155] “Serotype” with respect to vector or virus capsid is defined by a distinct immunological profile based on the capsid protein sequences and capsid structure.

[0156] The term “ratio” refers to the comparison of two or more numbers that indicates their quantitative relation to each other. In some aspects, a ratios can be used to compare two portions within a whole or total amount.

[0157] As used herein, the term “vector ratio” refers to the amount, in vector genomes (vg), of one AAV vector compared to the amount, in vector genomes, of another AAV vector.

### Otoferlin

[0158] The human OTOF gene encodes otoferlin, which is a protein that, in some aspects, plays a critical role in priming, fusion, and/or replenishing of synaptic vesicles of inner hair cell synapses during sound encoding. To date, several hundred mutations in the human OTOF gene have been identified to cause profound prelingual deafness DFNB9. Such mutations are the cause of deafness in 2-8% of people that are born with an autosomal, recessively inherited, non-syndromic deafness in different populations (Rodriguez-Ballesteros et al. (2008) Hum. Mutat. 29 823-831; Choi et al. (2009) Clinical Genetics 75 237-243; Duman et al. (2011) Genet Test Mol Biomarkers 15 29-33; Varga et al. (2006) J Med Genet 43 576-581; Iwasa et al. (2013) BMC Med. Genet. 14 95. Biallelic otoferlin gene mutations cause localized, synaptic transmission defects between hair cells and the auditory nerve. Otoferlin enables sensory cells to release neurotransmitters in response to stimulation by sound to activate auditory neurons and those neurons carry electronically encoded acousting information to the brain to produce “hearing.” When biallelic mutations in OTOF are present, that transmission is impaired and, as a result, a majority of subjects have congenital, bilateral severe to profound sensorineural hearing loss. For example, two substitutions in exon 15 at positions 490 and 515 in the conserved C2C domain of otoferlin cause DFNB9 (Mirqhomizadeh et al. (2002) Neurobiol. Dis. 10 (2): 157-164). Migliosi et al. found a novel mutation Q829X in OTOF in Spanish subjects with prelingual non-syndromic hearing loss (Migliosi et al. (2002) J. Med. Genet. 39 (7): 502-506).

[0159] Additional exemplary mutations in a otoferlin gene detected in subjects having hearing loss and methods of sequencing a nucleic acid encoding otoferlin are described in, e.g., Rodriguez-Ballesteros et al. (2003) Hum Mutat. 22:451-456; Wang et al. (2010) BMC Med Genet. 11:79; Yildirim-Baylan et al. (2014) Int. J. Pediatr. Otorhinolaryngol 78:950-953; Choi et al. (2009) Clin. Genet. 75 (3): 237-243; and Marlin et al. (2010) Biochem Biophys Res Commun 394:737-742.

[0160] Otoacoustic emissions (e.g., distortion product otoacoustic emissions (DPOAEs)) from DFNB9 subjects are normal, at least for the first decade of life, indicating morphological integrity of the inner ear and proper function of outer hair cells. Accordingly, in some aspects, the subject has preserved DPOAEs. Apart from the lack of synaptic transmission and the subsequent loss of synapses, the morphology and physiology of the inner ear remains preserved in DFNB9, at least during the first decade in life in humans. Accordingly, in some aspects, restoration of OTOF and/or otoferlin function may serve to mitigate or prevent secondary degeneration of one or more cochlear structures.

[0161] Studies in mouse models revealed that synapses are structurally normal, and IHCs preserve normal synapse numbers in mice within the first postnatal week. Between P6 and P15, about half of the synapses get lost (Roux et al. (2006) Cell 127 277-289). Animal models allowed studying the effect of mutations in otoferlin on synaptic transmission by recording the change in plasma membrane capacitance after vesicle fusion and the activity in the auditory nerve. In otoferlin knock-out (Otof−/−) mice, almost no exocytosis could be triggered in IHCs by depolarization induced Ca2+ influx through voltage gated Ca2+ channels (Roux et al. (2006) Cell 127 277-289). In profoundly hearing impaired pachanga (OtofPga/Pga) mice with a random point mutation in the C2F domain, short (<10 ms) depolarizations of the IHCs elicited vesicle fusion of similar size as in wild type mice, however sustained stimulations uncovered a strong deficiency in replenishing vesicles to the readily releasable pool (Pangrsic et al. (2010) Nat. Neurosci. 13 869-876). The p.Ile515Thr mutation, found in human subjects with only mildly elevated hearing thresholds but a severe reduction in speech understanding and a temperature-dependent deafening (Varga et al. (2006) J Med Genet 43 576-581), uncovered an intermediate phenotype when studied in a mouse model (Strenzke et al. (2016) EMBO J. 35:2519-2535). Humans with bialellic pII515Thr mutations were shown to experience worsened hearing loss while febrile, with a return to pre-fever hearing function when afebrile (Varga et al. (2006) J Med Genet 43 576-581). Otof1515T/1515T mice showed a moderate elevation of hearing thresholds when assessed by ABR with a reduction in wave I amplitude, but normal auditory thresholds in behavioral tests and recordings of single auditory nerve units. Exocytosis of the RRP is again intact, but sustained exocytosis is reduced, although not as severe as in OtofPga/Pga. While in wild type mice at room temperature, during a sustained stimulus 750 vesicles can fuse per second at each active zone, this rate drops to 350 vesicles/s/active zone in Otof1515T/1515T mice and to 200 vesicles/s/active zone in OtofPga/Pga IHCs (Pangrsic et al. (2010) Nat. Neurosci. 13 869-876; Strenzke et al. (2016) EMBO J. 35 2519-2535). This correlated with lower otoferlin protein levels at the plasma membrane of IHCs, indicating that the amount of otoferlin scales with exocytosis and hearing (Strenzke et al. (2016) EMBO J. 35 2519-2535).

[0162] Methods of detecting mutations in a gene are well-known in the art. Non-limiting examples of such techniques include: real-time polymerase chain reaction (RT-PCR), PCR, sequencing, Southern blotting, and Northern blotting.

[0163] The OTOF gene encodes otoferlin, a protein that is involved in synaptic vesicle exocytosis in cochlear hair cells (see, e.g., Johnson and Chapman (2010) J. Cell Biol. 191 (1): 187-198; and Heidrych et al. (2008) Hum. Mol. Genet. 17:3814-3821).

[0164] The human OTOF gene is located on chromosome 2p23.3. It contains 48 exons encompassing ˜132 kilobases (kb) (NCBI Accession No. NG009937.1). The mRNA encoding the long-form of otoferlin expressed in the brain includes 48 exons (Yasunaga et al., Am. J. Hum. Genet. 67:591-600, 2000). Forward and reverse primers that can be used to amplify each of the 48 exons in the OTOF gene are described in Table 2 of Yasunaga et al., Am. J. Hum. Genet. 67:591-600, 2000. In some examples, the full-length OTOF protein is a full-length wildtype OTOF protein. The full-length wildtype OTOF protein expressed from the human OTOF gene is 1997 residues in length.

[0165] An exemplary human wildtype otoferlin protein is or includes the sequence of any one of SEQ ID NOs: 1-5. Isoform e of human otoferlin protein (SEQ ID NO: 5) is encoded by an mRNA that includes exon 48 and does not include exon 47 of the otoferlin gene (Yasunaga et al., Am. J. Hum. Genet. 67:591-600, 2000). In some aspects, the active otoferlin protein has the sequence of SEQ ID NO: 5, but is missing the 20 amino acids including the RXR motif identified in Strenzke et al., EMBO J. 35 (23): 2499-2615, 2016. Non-limiting examples of nucleic acids encoding a wildtype otoferlin protein are or include any one of SEQ ID NO: 7-11. As can be appreciated in the art, at least some or all of the codons in SEQ ID NO: 7-11 can be codon-optimized to allow for optimal expression in a non-human mammal or in a human. Orthologs of human otoferlin proteins are known in the art.

Human Otoferlin Protein cDNA Sequences:
[0166] Human canonical (long) isoform sequence (otoferlin protein) (SEQ ID NO: 1) (also called otoferlin isoform a) (NCBI Accession No. AAD26117.1)
[0167] Human Isoform 2 (short 1) (otoferlin protein) (SEQ ID NO: 2) (also called otoferlin isoform d) (NCBI Accession No. NP_919304.1)
[0168] Human Isoform 3 (short 2) (otoferlin protein) (SEQ ID NO: 3) (also called otoferlin isofom c) (NCBI Accession No. NP_919303.1)
[0169] Human Isoform 4 (short 3) (otoferlin protein) (SEQ ID NO: 4) (also called otoferlin isoform b) (NCBI Accession No. NP_004793.2)
[0170] Human Isoform 5 (short 4) (otoferlin protein) (SEQ ID NO: 5) (also called otoferlin isoform e) (NCBI Accession No. NP_001274418.1)
[0171] Complete cds (otoferlin cDNA) (www.ncbi.nlm.nih.gov/nuccore/AF107403.1) (SEQ ID NO: 6) (encodes the protein of SEQ ID NO: 1)
[0172] Human Otoferlin Transcript Variant 1 (www.ncbi.nlm.nih.gov/nuccore/NM_194248.2) (SEQ ID NO: 7) (encodes the protein of SEQ ID NO: 1)
[0173] Human Otoferlin Transcript Variant 2 (www.ncbi.nlm.nih.gov/nuccore/NM_004802.3) (SEQ ID NO: 8) (encodes the protein of SEQ ID NO: 4)
[0174] Human Otoferlin Transcript Variant 3 (www.ncbi.nlm.nih.gov/nuccore/NM_194322.2) (SEQ ID NO: 9) (encodes the protein of SEQ ID NO: 3)
[0175] Human Otoferlin Transcript Variant 4 (www.ncbi.nlm.nih.gov/nuccore/NM_194323.2) (SEQ ID NO: 10) (encodes the protein of SEQ ID NO: 2)
[0176] Human Otoferlin Transcript Variant 5 (www.ncbi.nlm.nih.gov/nuccore/NM_001287489.1) (SEQ ID NO: 11) (encodes the protein of SEQ ID NO: 5)

[0177] A non-limiting example of a human wildtype otoferlin genomic DNA sequence is SEQ ID NO: 12. The exons in SEQ ID NO: 12 are: nucleotide positions 5001-5206 (exon 1), nucleotide positions 25925-25983 (exon 2), nucleotide positions 35779-35867 (exon 3), nucleotide positions 44590-44689 (exon 4), nucleotide positions 47100-47281 (exon 5), nucleotide positions 59854-59927 (exon 6), nucleotide positions 61273-61399 (exon 7), nucleotide positions 61891-61945 (exon 8), nucleotide positions 68626-68757 (exon 9), nucleotide positions 73959-74021 (exon 10), nucleotide positions 74404-74488 (exon 11), nucleotide positions 79066-79225 (exon 12), nucleotide positions 80051-80237 (exon 13), nucleotide positions 81107-81293 (exon 14), nucleotide positions 82690-82913 (exon 15), nucleotide positions 83388-83496 (exon 16), nucleotide positions 84046-84226 (exon 17), nucleotide positions 84315-84435 (exon 18), nucleotide positions 85950-86050 (exon 19), nucleotide positions 86193-86283 (exon 20), nucleotide positions 86411-86527 (exon 21), nucleotide positions 86656-86808 (exon 22), nucleotide positions 87382-87571 (exon 23), nucleotide positions 87661-87785 (exon 24), nucleotide positions 88206-88340 (exon 25), nucleotide positions 89025-89186 (exon 26), nucleotide positions 89589-89708 (exon 27), nucleotide positions 90132-90293 (exon 28), nucleotide positions 90405-90567 (exon 29), nucleotide positions 91050-91180 (exon 30), nucleotide positions 92549-92578 (exon 31), nucleotide positions 92978-93106 (exon 32), nucleotide positions 95225-95291 (exon 33), nucleotide positions 96198-96334 (exon 34), nucleotide positions 96466-96600 (exon 35), nucleotide positions 96848-96985 (exon 36), nucleotide positions 97623-97750 (exon 37), nucleotide positions 97857-98027 (exon 38), nucleotide positions 98670-98830 (exon 39), nucleotide positions 99593-99735 (exon 40), nucleotide positions 100128-100216 (exon 41), nucleotide positions 101518-101616 (exon 42), nucleotide positions 101762-102003 (exon 43), nucleotide positions 102669-102847 (exon 44), nucleotide positions 102952-103052 (exon 45), nucleotide positions 103494-103691 (exon 46), nucleotide positions 105479-106496 (exon 47), and exon 48 (the sequence starting with CCGGCCCGAC; see also the description of this exon in Yasunaga et al., Am. J. Hum. Genet. 67:591-600, 2000).

[0178] The introns are located between each contiguous pair of exons in SEQ ID NO: 12, i.e., at nucleotide positions 100-5001 (intron 1), nucleotide 5207-25924 (intron 2), nucleotide positions 25984-35778 (intron 3), nucleotide positions 35868-44589 (intron 4), nucleotide positions 44690-47099 (intron 5), nucleotide positions 47282-59853 (intron 6), nucleotide positions 59928-61272 (intron 7), nucleotide positions 61400-61890 (intron 8), nucleotide positions 61946-68625 (intron 9), nucleotide positions 68758-73958 (intron 10), nucleotide positions 74022-74403 (intron 11), nucleotide positions 74489-79065 (intron 12), nucleotide positions 79226-80050 (intron 13), nucleotide positions 80238-81106 (intron 14), nucleotide positions 81294-82689 (intron 15), nucleotide positions 82914-83387 (intron 16), nucleotide positions 83497-84045 (intron 17), nucleotide positions 84227-84314 (intron 18), nucleotide positions 84436-85949 (intron 19), nucleotide positions 86051-86192 (intron 20), nucleotide positions 86284-86410 (intron 21), nucleotide positions 86528-86655 (intron 22), nucleotide positions 86809-87381 (intron 23), nucleotide positions 87572-87660 (intron 24), nucleotide positions 87786-88205 (intron 25), nucleotide positions 88341-89024 (intron 26), nucleotide positions 89187-89588 (intron 27), nucleotide positions 89709-90131 (intron 28), nucleotide positions 90294-90404 (intron 29), nucleotide positions 90568-91049 (intron 30), nucleotide positions 91181-92548 (intron 31), nucleotide positions 92579-92977 (intron 32), nucleotide positions 93107-95224 (intron 33), nucleotide positions 95292-96197 (intron 34), nucleotide positions 96335-96465 (intron 35), nucleotide positions 96601-96847 (intron 36), nucleotide positions 96986-97622 (intron 37), nucleotide positions 97751-97856 (intron 38), nucleotide positions 98028-98669 (intron 39), nucleotide positions 98831-99592 (intron 40), nucleotide positions 99736-100127 (intron 41), nucleotide positions 100217-101517 (intron 42), nucleotide positions 101617-101761 (intron 43), nucleotide positions 102004-102668 (intron 44), nucleotide positions 102848-102951 (intron 45), nucleotide positions 103053-103494 (intron 46), nucleotide positions 103692-105478 (intron 47), and nucleotide positions 106497-108496 (intron 48).

[0179] In some aspects, an otoferlin gene may be split into two or more segments between or within any appropriate exons and/or introns, where each segment is included in a different vector of the present disclosure. In some aspects, the otoferlin gene is split at exon 21, i.e., with exons 1 to (and through) 21 in a first vector and exons 22 to (and through) exon 48 in a second vector. In some such aspects the otoferlin segments in the first and second vectors are derived from an otoferlin cDNA sequence and lack introns, i.e., with exons 1 to (and through) 21 in a first vector and exons 22 to (and through) exon 48 in a second vector, each vector lacking otoferlin introns. In some aspects, an otoferlin gene may be split at one or more other exons and/or introns as long as, when combined with all other components of a vector, the packaging capacity of the vector is not exceeded.
[0180] Human Otoferlin Gene Sequence (ncbi.nlm.nih.gov/nuccore/224465243) (SEQ ID NO: 12)
[0181] Mouse Otoferlin Protein (SEQ ID NO: 13) (NCBI Accession No. NP_001300696.1)
[0182] Mouse Otoferlin cDNA (SEQ ID NO: 14) (NCBI Accession No. NM_001313767.1)
[0183] Mouse Otoferlin Gene Sequence (www.ncbi.nlm.nih.gov/gene/83762) (SEQ ID NO: 15) Accession: NC_000071 REGION: complement (30367066 . . . 30462730) GPC_000000778; NCBI Reference Sequence: NC_000071.6
[0184] Zebrafish Otoferlin A Gene Sequence (www.ncbi.nlm.nih.gov/gene/557476) (SEQ ID NO: 16) ACCESSION NC_007131 REGION: 31173357 . . . 31310109 GPC_000001574
[0185] NCBI Reference Sequence: NC_007131.7
[0186] Rhesus Monkey Otoferlin Gene Sequence (www.ncbi.nlm.nih.gov/gene/696717) (SEQ ID NO: 17) ACCESSION NC 027905 REGION: complement (26723411 . . . 26826586) GPC_000002105 NCBI Reference Sequence: NC_027905.1
[0187] Dog Otoferlin Gene Sequence (www.ncbi.nlm.nih.gov/gene/607961) (SEQ ID NO: 18)
[0188] ACCESSION NC_006599 REGION: complement (20518502 . . . 20619461) GPC_000000676 NCBI Reference Sequence: NC_006599.3
[0189] Chimpanzee Otoferlin Gene Sequence (www.ncbi.nlm.nih.gov/gene/459083) (SEQ ID NO: 19) ACCESSION NC 006469 REGION: complement (27006052 . . . 27107747) GPC_000002338 NCBI Reference Sequence: NC 006469.4
[0190] Rat Otoferlin Protein (SEQ ID NO: 20)
[0191] Zebrafish Otoferlin Protein (SEQ ID NO: 21)
[0192] Cow Otoferlin Protein (SEQ ID NO: 22)
[0193] Baboon Otoferlin Protein (SEQ ID NO: 23)

[0194] In some aspects, a first vector comprises a 5′ portion of OTOF cDNA, having a nucleic acid sequence with at least 70%, at least 75%, at least 80%, at least 85%, at least 90%, at least 91%, at least 92%, at least 93%, at least 94%, at least 95%, at least 96%, at least 97%, at least 98%, at least 99%, or 100% identity to SEQ ID NO: 94. In some aspects, the first vector comprises a 5′ portion of OTOF cDNA having the sequence of SEQ ID NO: 94.

[0195] In some aspects, a second vector comprises a 3′ portion of OTOF cDNA, having a nucleic acid sequence with at least 70%, at least 75%, at least 80%, at least 85%, at least 90%, at least 91%, at least 92%, at least 93%, at least 94%, at least 95%, at least 96%, at least 97%, at least 98%, at least 99%, or 100% identity to SEQ ID NO: 95. In some aspects, the second vector comprises a 5′ portion of OTOF cDNA having the sequence of SEQ ID NO: 95.

5′mOTOF DNA Sequence
(SEQ ID NO: 94)
ATGGCCCTGATTGTTCACCTCAAGACTGTCTCAGAGCTCCGAGGCAAAGG
TGACCGGATTGCCAAAGTCACTTTCCGAGGGCAGTCTTTCTACTCCCGGG
TCCTGGAGAACTGCGAGGGTGTGGCTGACTTTGATGAGACGTTCCGGTGG
CCAGTGGCCAGCAGCATCGACCGGAATGAAGTGTTGGAGATTCAGATTTT
CAACTACAGCAAAGTCTTCAGCAACAAGCTGATAGGGACCTTCTGCATGG
TGCTGCAGAAAGTGGTGGAGGAGAATCGGGTAGAGGTGACCGACACGCTG
ATGGATGACAGCAATGCTATCATCAAGACCAGCCTGAGCATGGAGGTCCG
GTATCAGGCCACAGATGGCACTGTGGGCCCCTGGGATGATGGAGACTTCC
TGGGAGATGAATCCCTCCAGGAGGAGAAGGACAGCCAGGAGACAGATGGG
CTGCTACCTGGTTCCCGACCCAGCACCCGGATATCTGGCGAGAAGAGCTT
TCGCAGAGCGGGAAGGAGTGTGTTCTCGGCCATGAAACTCGGCAAAACTC
GGTCCCACAAAGAGGAGCCCCAAAGACAAGATGAGCCAGCAGTGCTGGAG
ATGGAGGACCTGGACCACCTAGCCATTCAGCTGGGGGATGGGCTGGACCC
TGACTCCGTGTCTCTAGCCTCGGTCACCGCTCTCACCAGCAATGTCTCCA
ACAAACGGTCTAAGCCAGATATTAAGATGGAGCCCAGTGCTGGAAGGCCC
ATGGATTACCAGGTCAGCATCACAGTGATTGAGGCTCGGCAGCTGGTGGG
CTTGAACATGGACCCTGTGGTGTGTGTGGAGGTGGGTGATGACAAGAAAT
ACACGTCAATGAAGGAGTCCACAAACTGCCCTTACTACAACGAGTACTTT
GTCTTCGACTTCCATGTCTCTCCTGATGTCATGTTTGACAAGATCATCAA
GATCTCGGTTATCCATTCTAAGAACCTGCTTCGGAGCGGCACCCTGGTGG
GTTCCTTCAAAATGGATGTGGGGACTGTGTATTCCCAGCCTGAACACCAG
TTCCATCACAAATGGGCCATCCTGTCAGACCCCGATGACATCTCTGCTGG
GTTGAAGGGTTATGTAAAGTGTGATGTCGCTGTGGTGGGCAAGGGAGACA
ACATCAAGACACCCCACAAGGCCAACGAGACGGATGAGGACGACATTGAA
GGGAACTTGCTGCTCCCCGAGGGCGTGCCCCCCGAACGGCAGTGGGCACG
GTTCTATGTGAAAATTTACCGAGCAGAGGGACTGCCCCGGATGAACACAA
GCCTCATGGCCAACGTGAAGAAGGCGTTCATCGGTGAGAACAAGGACCTC
GTCGACCCCTATGTGCAAGTCTTCTTTGCTGGACAAAAGGGCAAAACATC
AGTGCAGAAGAGCAGCTATGAGCCGCTATGGAATGAGCAGGTCGTCTTCA
CAGACTTGTTCCCCCCACTCTGCAAACGCATGAAGGTGCAGATCCGGGAC
TCTGACAAGGTCAATGATGTGGCCATCGGCACCCACTTCATCGACCTGCG
CAAGATTTCCAACGATGGAGACAAAGGCTTCCTGCCTACCCTCGGTCCAG
CCTGGGTGAACATGTACGGCTCCACGCGCAACTACACACTGCTGGACGAG
CACCAGGACTTGAATGAAGGCCTGGGGGAGGGTGTGTCCTTCCGGGCCCG
CCTCATGTTGGGACTAGCTGTGGAGATCCTGGACACCTCCAACCCAGAGC
TCACCAGCTCCACGGAGGTGCAGGTGGAGCAGGCCACGCCTGTCTCGGAG
AGCTGCACAGGGAGAATGGAAGAATTTTTTCTATTTGGAGCCTTCTTGGA
AGCCTCAATGATTGACCGGAAAAATGGGGACAAGCCAATTACCTTTGAGG
TGACCATAGGAAACTACGGCAATGAAGTCGATGGTATGTCCCGGCCCCTG
AGGCCTCGGCCCCGGAAAGAGCCTGGGGATGAAGAAGAGGTAGACCTGAT
TCAGAACTCCAGTGACGATGAAGGTGACGAAGCCGGGGACCTGGCCTCGG
TGTCCTCCACCCCACCTATGCGGCCCCAGATCACGGACAGGAACTATTTC
CACCTGCCCTACCTGGAGCGCAAGCCCTGCATCTATATCAAGAGCTGGTG
GCCTGACCAGAGGCGGCGCCTCTACAATGCCAACATCATGGATCACATTG
CTGACAAGCTGGAAGAAGGCCTGAATGATGTACAGGAGATGATCAAAACG
GAGAAGTCCTACCCGGAGCGCCGCCTGCGGGGTGTGCTAGAGGAACTCAG
CTGTGGCTGCCACCGCTTCCTCTCCCTCTCGGACAAGGACCAGGGCCGCT
CGTCCCGCACCAGGCTGGATCGAGAGCGTCTTAAGTCCTGTATGAGGGAG
TTGGAGAGCATGGGACAGCAGGCCAAGAGCCTGAGGGCTCAGGTGAAGCG
GCACACTGTTCGGGACAAGCTGAGGTCATGCCAGAACTTTCTGCAGAAGC
TACGCTTCCTGGCGGATGAG
3′mOTOF DNA Sequence
(SEQ ID NO: 95)
CCCCAGCACAGCATTCCGGATGTGTTCATTTGGATGATGAGCAACAACAA
ACGTATCGCCTATGCCCGCGTGCCTTCCAAAGACCTGCTCTTCTCCATCG
TGGAGGAGGAACTGGGCAAGGACTGCGCCAAAGTCAAGACCCTCTTCCTG
AAGCTGCCAGGGAAGAGGGGCTTCGGCTCGGCAGGCTGGACAGTACAGGC
CAAGCTGGAGCTCTACCTGTGGCTGGGCCTCAGCAAGCAGCGAAAGGACT
TCCTGTGTGGTCTGCCCTGTGGCTTCGAGGAGGTCAAGGCAGCCCAAGGC
CTGGGCCTGCATTCCTTTCCGCCCATCAGCCTAGTCTACACCAAGAAGCA
AGCCTTCCAGCTCCGAGCACACATGTATCAGGCCCGAAGCCTCTTTGCTG
CTGACAGCAGTGGGCTCTCTGATCCCTTTGCCCGTGTCTTCTTCATCAAC
CAGAGCCAATGCACTGAGGTTCTAAACGAGACACTGTGTCCCACCTGGGA
CCAGATGCTGGTATTTGACAACCTGGAGCTGTACGGTGAAGCTCACGAGT
TACGAGATGATCCCCCCATCATTGTCATTGAAATCTACGACCAGGACAGC
ATGGGCAAAGCCGACTTCATGGGCCGGACCTTCGCCAAGCCCCTGGTGAA
GATGGCAGATGAAGCATACTGCCCACCTCGCTTCCCGCCGCAGCTTGAGT
ACTACCAGATCTACCGAGGCAGTGCCACTGCCGGAGACCTACTGGCTGCC
TTCGAGCTGCTGCAGATTGGGCCATCAGGGAAGGCTGACCTGCCACCCAT
CAATGGCCCAGTGGACATGGACAGAGGGCCCATCATGCCTGTGCCCGTGG
GAATCCGGCCAGTGCTCAGCAAGTACCGAGTGGAGGTGCTGTTCTGGGGC
CTGAGGGACCTAAAGAGGGTGAACCTGGCCCAGGTGGACCGACCACGGGT
GGACATCGAGTGTGCAGGAAAGGGGGTACAATCCTCCCTGATTCACAATT
ATAAGAAGAACCCCAACTTCAACACGCTGGTCAAGTGGTTTGAAGTGGAC
CTCCCGGAGAATGAGCTCCTGCACCCACCCTTGAACATCCGAGTGGTAGA
TTGCCGGGCCTTTGGACGATACACCCTGGTGGGTTCCCACGCAGTCAGCT
CACTGAGGCGCTTCATCTACCGACCTCCAGACCGCTCAGCCCCCAACTGG
AACACCACAGGGGAGGTTGTAGTAAGCATGGAGCCTGAGGAGCCAGTTAA
GAAGCTGGAGACCATGGTGAAACTGGATGCGACTTCTGATGCTGTGGTCA
AGGTGGATGTGGCTGAAGATGAGAAGGAAAGGAAGAAGAAGAAAAAGAAA
GGCCCGTCAGAGGAGCCAGAGGAGGAAGAGCCCGATGAGAGCATGCTGGA
TTGGTGGTCCAAGTACTTCGCCTCCATCGACACAATGAAGGAGCAACTTC
GACAACATGAGACCTCTGGAACTGACTTGGAAGAGAAGGAAGAGATGGAA
AGCGCTGAGGGCCTGAAGGGACCAATGAAGAGCAAGGAGAAGTCCAGAGC
TGCAAAGGAGGAGAAAAAGAAGAAAAACCAGAGCCCTGGCCCTGGCCAGG
GATCGGAGGCTCCTGAGAAGAAGAAAGCCAAGATCGATGAGCTTAAGGTG
TACCCCAAGGAGCTGGAATCGGAGTTTGACAGCTTTGAGGACTGGCTGCA
CACCTTCAACCTGTTGAGGGGCAAGACGGGAGATGATGAGGATGGCTCCA
CAGAGGAGGAGCGCATAGTAGGCCGATTCAAGGGCTCCCTCTGTGTGTAC
AAAGTGCCACTCCCAGAAGATGTATCTCGAGAAGCTGGCTATGATCCCAC
CTATGGAATGTTCCAGGGCATCCCAAGCAATGACCCCATCAATGTGCTGG
TCCGAATCTATGTGGTCCGGGCCACAGACCTGCACCCGGCCGACATCAAT
GGCAAAGCTGACCCCTATATTGCCATCAAGTTAGGCAAGACCGACATCCG
AGACAAGGAGAACTACATCTCCAAGCAGCTCAACCCTGTGTTTGGGAAGT
CCTTTGACATTGAGGCCTCCTTCCCCATGGAGTCCATGTTGACAGTGGCC
GTGTACGACTGGGATCTGGTGGGCACTGATGACCTCATCGGAGAAACCAA
GATTGACCTGGAAAACCGCTTCTACAGCAAGCATCGCGCCACCTGCGGCA
TCGCACAGACCTATTCCATACATGGCTACAATATCTGGAGGGACCCCATG
AAGCCCAGCCAGATCCTGACACGCCTCTGTAAAGAGGGCAAAGTGGACGG
CCCCCACTTTGGTCCCCATGGGAGAGTGAGGGTTGCCAACCGTGTCTTCA
CGGGGCCTTCAGAAATAGAGGATGAGAATGGTCAGAGGAAGCCCACAGAT
GAGCACGTGGCACTGTCTGCTCTGAGACACTGGGAGGACATCCCCCGGGT
GGGCTGCCGCCTTGTGCCGGAACACGTGGAGACCAGGCCGCTGCTCAACC
CTGACAAGCCAGGCATTGAGCAGGGCCGCCTGGAGCTGTGGGTGGACATG
TTCCCCATGGACATGCCAGCCCCTGGGACACCTCTGGATATATCCCCCAG
GAAACCCAAGAAGTACGAGCTGCGGGTCATCGTGTGGAACACAGACGAGG
TGGTCCTGGAAGACGATGATTTCTTCACGGGAGAGAAGTCCAGTGACATT
TTTGTGAGGGGGTGGCTGAAGGGCCAGCAGGAGGACAAACAGGACACAGA
TGTCCACTATCACTCCCTCACGGGGGAGGGCAACTTCAACTGGAGATACC
TCTTCCCCTTCGACTACCTAGCGGCCGAAGAGAAGATCGTTATGTCCAAA
AAGGAGTCTATGTTCTCCTGGGATGAGACGGAGTACAAGATCCCTGCGCG
GCTCACCCTGCAGATCTGGGACGCTGACCACTTCTCGGCTGACGACTTCC
TGGGGGCTATCGAGCTGGACCTGAACCGGTTCCCGAGGGGCGCTAAGACA
GCCAAGCAGTGCACCATGGAGATGGCCACCGGGGAGGTGGACGTACCCCT
GGTTTCCATCTTTAAACAGAAACGTGTCAAAGGCTGGTGGCCCCTCCTGG
CCCGCAATGAGAATGATGAGTTTGAGCTCACAGGCAAAGTGGAGGCGGAG
CTACACCTACTCACGGCAGAGGAGGCAGAGAAGAACCCTGTGGGCCTGGC
TCGCAATGAACCTGATCCCCTAGAAAAACCCAACCGGCCTGACACGGCAT
TCGTCTGGTTCCTGAACCCACTCAAATCTATCAAGTACCTCATCTGCACC
CGGTACAAGTGGCTGATCATCAAGATCGTGCTGGCGCTGCTGGGGCTGCT
CATGCTGGCCCTCTTCCTTTACAGCCTCCCAGGCTACATGGTCAAGAAGC
TCCTAGGGGCCTGA

[0196] Some aspects of any of the compositions described herein can include a first vector including the coding sequence of SEQ ID NO: 94 (or include a sequence that is at least 70%, at least 75%, at least 80%, at least 85%, at least 90%, at least 91%, at least 92%, at least 93%, at least 94%, at least 95%, at least 96%, at least 97%, at least 98%, or at least 99% identical to SEQ ID NO: 94). Some aspects of any of the compositions described herein can include a second vector including the coding sequence of SEQ ID NO: 95 (or include a sequence that is at least 70%, at least 75%, at least 80%, at least 85%, at least 90%, at least 91%, at least 92%, at least 93%, at least 94%, at least 95%, at least 96%, at least 97%, at least 98%, or at least 99% identical to SEQ ID NO: 95).

[0197] Some aspects of any of the compositions described herein can include a first rAAV vector with a 5′ OTOF coding region that comprises exons 1 to (and through) 21 of OTOF cDNA. In some aspects, the compositions comprises a first rAAV vector that comprises the nucleotide sequence of SEQ ID NO: 101 (or a sequence that is at least 70%, at least 75%, at least 80%, at least 85%, at least 90%, at least 91%, at least 92%, at least 93%, at least 94%, at least 95%, at least 96%, at least 97%, at least 98%, or at least 99% identical to the nucleotide sequence of SEQ ID NO: 101). In some aspects, the compositions comprise a first rAAV vector that comprises a nucleotide sequence that is at least 70%, at least 75%, at least 80%, at least 85%, at least 90%, at least 91%, at least 92%, at least 93%, at least 94%, at least 95%, at least 96%, at least 97%, at least 98%, or at least 99% identical to the nucleotide sequence of SEQ ID NO: 101, and encodes the same amino acid sequence as encoded by SEQ ID NO: 101.

[0198] In some aspects, a composition of the present disclosure includes a first rAAV vector that comprises a codon optimized version of SEQ ID NO: 101, i.e., a nucleotide sequence that encodes the same amino acid sequence as encoded by SEQ ID NO: 101 but with codons that have been optimized for expression in a particular cell type, e.g., a mammalian cell, e.g., a human cell. In some aspects the first vector does not include any other portion of an OTOF gene. In some aspects the first vector does not include any other portion of OTOF cDNA.

[0199] In some aspects, the compositions comprise a second rAAV vector with a 3′ OTOF coding region that comprises exons 22 to (and through) exon 48 of OTOF cDNA. In some aspects, the compositions comprise a second rAAV vector that comprises the nucleotide sequence of SEQ ID NO: 107 (or a sequence that is at least 70%, at least 75%, at least 80%, at least 85%, at least 90%, at least 91%, at least 92%, at least 93%, at least 94%, at least 95%, at least 96%, at least 97%, at least 98%, or at least 99% identical to the nucleotide sequence of SEQ ID NO: 107). In some aspects, the compositions comprise a second rAAV vector that comprises a nucleotide sequence that is at least 70%, at least 75%, at least 80%, at least 85%, at least 90%, at least 91%, at least 92%, at least 93%, at least 94%, at least 95%, at least 96%, at least 97%, at least 98%, or at least 99% identical to the nucleotide sequence of SEQ ID NO: 108, and encodes the same amino acid sequence as encoded by SEQ ID NO: 107.

[0200] In some aspects, a composition comprises a second rAAV vector that comprises a codon optimized version of SEQ ID NO: 107, i.e., a nucleotide sequence that encodes the same amino acid sequence as encoded by SEQ ID NO: 107 but with codons that have been optimized for expression in a particular cell type, e.g., a mammalian cell, e.g., a human cell. In some aspects, the second rAAV vector does not include any other portion of an OTOF gene. In some aspects, the second rAAV vector does not include any other portion of OTOF cDNA.

[0201] One skilled in the art would appreciate that amino acids that are not conserved between wildtype otoferlin proteins from different species can be mutated without losing activity, while those amino acids that are conserved between wildtype otoferlin proteins from different species should not be mutated as they are more likely (than amino acids that are not conserved between different species) to be involved in activity.

### ITRs

[0202] In some aspects, the AAV vector comprises 5′ and 3′ inverted terminal repeats (ITRs). In some aspects, the rAAV vector comprises 5′ and 3′ inverted terminal repeats. In some aspects, the AAV sequences of the vector comprises the cis-acting 5′ and 3′ inverted terminal repeat sequences (See, e.g., B. J. Carter, in “Handbook of Parvoviruses”, ed., P. Tijsser, CRC Press, pp. 155 168 (1990)). In some aspects, the ITR sequences are about 145 nt in length. In some aspects, substantially the entire sequences encoding the ITRs are used in the molecule, although some degree of minor modification of these sequences is permissible. The ability to modify these ITR sequences is within the skill of the art. (See, e.g., texts such as Sambrook et al. “Molecular Cloning. A Laboratory Manual”, 2d ed., Cold Spring Harbor Laboratory, New York (1989); and K. Fisher et al., J Virol., 70:520 532 (1996)). An example of such a molecule employed in the present disclosure is a “cis-acting” plasmid containing the transgene, in which the selected transgene sequence and associated regulatory elements are flanked by 5′ and 3′ AAV ITR sequences. The AAV ITR sequences may be obtained from any known AAV, including presently identified mammalian AAV types. In some aspects, an ITR is or comprises 145 nucleotides.

[0203] In some aspects, the ITRs are AAV1, AAV2, AAV3, AAV4, AAV5, AAV6, AAV7, AAV8, AAV9, AAV10, AAV11, AAV12, or Anc80 ITRs. In some aspects, the ITRs are AAV2 ITRs. In some aspects, 5′ ITR has a sequence with at least 70%, at least 75%, at least 80%, at least 85%, at least 90%, at least 91%, at least 92%, at least 93%, at least 94%, at least 95%, at least 96%, at least 97%, at least 98%, at least 99%, or 100% identity to SEQ ID NO: 97. In some aspects, 5′ ITR has the sequence of SEQ ID NO: 97. In some aspects, 3′ ITR has a sequence with at least 70%, at least 75%, at least 80%, at least 85%, at least 90%, at least 91%, at least 92%, at least 93%, at least 94%, at least 95%, at least 96%, at least 97%, at least 98%, at least 99%, or 100% identity to SEQ ID NO: 104. In some aspects, 3′ ITR has the sequence of SEQ ID NO: 104.

[0204] In some aspects an ITR is a wild-type AAV2 ITR, e.g., 5′ ITR of SEQ ID NO: 97 and 3′ ITR of SEQ ID NO: 104. In some aspects an ITR is derived from a wild-type AAV2 ITR and includes one or more modifications, e.g., truncations, deletions, substitutions or insertions as is known in the art. In some aspects, an ITR comprises fewer than 145 nucleotides, e.g., 127, 130, 134 or 141 nucleotides. For example, in some aspects, an ITR comprises 110, 111, 112, 113, 114, 115, 116, 117, 118, 119, 120, 121, 122, 123, 124, 125, 126, 127, 128, 129, 130, 131, 132, 133, 134, 135, 136, 137, 138, 139, 140, 141, 142, 143 144, or 145 nucleotides.

[0205] In some aspects, 5′ ITR has at least 70%, at least 75%, at least 80%, at least 85%, at least 90%, at least 91%, at least 92%, at least 93%, at least 94%, at least 95%, at least 96%, at least 97%, at least 98%, at least 99%, or 100% identity to SEQ ID NO: 59. In some aspects, 3′ ITR has at least 70%, at least 75%, at least 80%, at least 85%, at least 90%, at least 91%, at least 92%, at least 93%, at least 94%, at least 95%, at least 96%, at least 97%, at least 98%, at least 99%, or 100% identity to SEQ ID NO: 60.

[0206] In some aspects, 5′ AAV ITR sequence has the sequence of SEQ ID NO: 59. In some aspects, 3′ AAV ITR sequence has the sequence of SEQ ID NO: 60. In some aspects, vectors and/or constructs of the present disclosure comprise a 5′ AAV ITR and/or a 3′ AAV ITR. In some aspects, 5′ AAV ITR sequence has the sequence of SEQ ID NO: 97. In some aspects, 3′ AAV ITR sequence has the sequence of SEQ ID NO: 104. In some aspects, 5′ AAV ITR sequence is SEQ ID NO: 97 and 3′ AAV ITR sequence is SEQ ID NO: 104. In some aspects, 5′ and a 3′ AAV ITRs (e.g., SEQ ID NOs: 97 and 104) flank a portion of a transgene and/or construct comprising a portion of OTOF (e.g., SEQ ID NO: 101 or 107).

[0207] In some aspects, the recombinant AAV vector comprises a nucleic acid sequence having at least 70%, at least 75%, at least 80%, at least 85%, at least 90%, at least 91%, at least 92%, at least 93%, at least 94%, at least 95%, at least 96%, at least 97%, at least 98%, at least 99%, or 100% identity to SEQ ID NO: 96. In some aspects, the recombinant AAV vector comprises a nucleic acid sequence with the sequence of SEQ ID NO: 96.

[0208] In some aspects, the recombinant AAV vector comprises a nucleic acid sequence having at least 70%, at least 75%, at least 80%, at least 85%, at least 90%, at least 91%, at least 92%, at least 93%, at least 94%, at least 95%, at least 96%, at least 97%, at least 98%, at least 99%, or 100% identity to SEQ ID NO: 105. In some aspects, the recombinant AAV vector comprises a nucleic acid sequence with the sequence of SEQ ID NO: 105.

### Promoters

[0209] In some aspects, the first recombinant adeno-associated viral (rAAV) vector comprises a first expression cassette comprising a promoter operably linked to nucleic acid sequence comprising a 5′ portion of an otoferlin gene. In some aspects, the first recombinant adeno-associated viral (rAAV) vector genome comprises a first expression cassette comprising a promoter operably linked to nucleic acid sequence comprising a 5′ portion of an otoferlin gene.

[0210] In some aspects, the promoter is selected from a constitutive promoter, an inducible promoter, or a tissue-specific promoter. In some aspects, the promoter is a constitutive promoter. In some aspects, the constitutive promoter is selected from a CAG, CBA, or CMV promoter. In some aspects, the constitutive promoter is a CAG promoter.

[0211] Non-limiting examples of promoters are described herein. Additional examples of promoters are known in the art.

[0212] In some aspects, a vector encoding an N-terminal portion of an otoferlin protein (e.g., a human otoferlin protein) can include a promoter and/or an enhancer. The vector encoding the N-terminal portion of the otoferlin protein can include any of the promoters and/or enhancers described herein or known in the art.

[0213] In some aspects, the promoter is an inducible promoter, a constitutive promoter, a mammalian cell promoter, a viral promoter, a chimeric promoter, an engineered promoter, a tissue-specific promoter, or any other type of promoter known in the art. In some aspects, the promoter is a RNA polymerase II promoter, such as a mammalian RNA polymerase II promoter. In some aspects, the promoter is a RNA polymerase III promoter, including, but not limited to, a H1 promoter, a human U6 promoter, a mouse U6 promoter, or a swine U6 promoter. The promoter will generally be one that is able to promote transcription in cochlear cells such as hair cells. In some examples, the promoter is a cochlea-specific promoter or a cochlea-oriented promoter.

[0214] A variety of promoters are known in the art that can be used herein. Non-limiting examples of promoters that can be used herein include: human elongation factor 1α-subunit (EF1a) (Liu et al. (2007) Exp. Mol. Med. 39 (2): 170-175; Accession No. J04617.1; Gill et al., Gene Ther. 8 (20): 1539-1546, 2001; Xu et al., Human Gene Ther. 12 (5): 563-573, 2001; Xu et al., Gene Ther. 8:1323-1332; Ikeda et al., Gene Ther. 9:932-938, 2002; Gilham et al., J. Gene Med. 12 (2): 129-136, 2010), cytomegalovirus (Xu et al., Human Gene Ther. 12 (5): 563-573, 2001; Xu et al., Gene Ther. 8:1323-1332; Gray et al., Human Gene Ther. 22:1143-1153, 2011), human immediate-early cytomegalovirus (CMV) (U.S. Pat. No. 5,168,062, Liu et al. (2007) Exp. Mol. Med. 39 (2): 170-175; Accession No. X17403.1 or KY490085.1), human ubiquitin C (UBC) (Gill et al., Gene Ther. 8 (20): 1539-1546, 2001; Qin et al., PLOS One 5 (5): e10611, 2010), mouse phosphoglycerate kinase 1, polyoma adenovirus, simian virus 40 (SV40), β-globin, β-actin, α-fetoprotein, γ-globin, β-interferon, γ-glutamyl transferase, mouse mammary tumor virus (MMTV), Rous sarcoma virus, rat insulin, glyceraldehyde-3-phosphate dehydrogenase, metallothionein II (MT II), amylase, cathepsin, MI muscarinic receptor, retroviral LTR (e.g. human T-cell leukemia virus HTLV), AAV ITR, interleukin-2, collagenase, platelet-derived growth factor, adenovirus 5 E2, stromelysin, murine MX gene, glucose regulated proteins (GRP78 and GRP94), α-2-macroglobulin, vimentin, MHC class I gene H-2κ b, HSP70, proliferin, tumor necrosis factor, thyroid stimulating hormone a gene, immunoglobulin light chain, T-cell receptor, HLA DQα and DQβ, interleukin-2 receptor, MHC class II, MHC class II HLA-DRα, muscle creatine kinase, prealbumin (transthyretin), elastase I, albumin gene, c-fos, c-HA-ras, neural cell adhesion molecule (NCAM), H2B (TH2B) histone, rat growth hormone, human serum amyloid (SAA), troponin I (TN I), duchenne muscular dystrophy, human immunodeficiency virus, Gibbon Ape Leukemia Virus (GALV) promoters, promoter of HNRPA2B1-CBX1 (UCOE) (Powell and Gray (2015) Discov. Med. 19 (102): 49-57; Antoniou et al., Human Gene Ther. 24 (4): 363-374, 2013), β-glucuronidase (GUSB) (Husain et al., Gene Ther. 16:927-932, 2009), chicken β-actin (CBA) (Liu et al. (2007) Exp. Mol. Med. 39 (2): 170-175; Stone et al. (2005) Mol. Ther. 11 (6): 843-848; Klein et al., Exp. Neurol. 176 (1): 66-74, 2002; Ohlfest et al., Blood 105:2691-2698, 2005; Gray et al., Human Gene Ther. 22:1143-1153, 2011), a human β-actin promoter (HBA) (Accession No. Y00474.1), murine myosin VIIA (musMyo7) (Boeda et al. (2001) Hum. Mol. Genet. 10 (15): 1581-1589; Accession No. AF384559.1), human myosin VIIA (hsMyo7) (Boeda et al. (2001) Hum. Mol. Genet. 10 (15): 1581-1589; Accession No. NG_009086.1), murine poly (ADP-ribose) polymerase 2 (musPARP2) (Ame et al. (2001) J. Biol. Chem. 276 (14): 11092-11099; Accession No. AF191547.1), human poly(ADP-ribose) polymerase 2 (hsPARP2) (Ame et al. (2001) J. Biol. Chem. 276 (14): 11092-11099; Accession No. X16612.1 or AF479321.1), acetylcholine receptor epsilon-subunit (AChε) (Duclert et al. (1993) PNAS 90 (7): 3043-3047; Accession No. S58221.1 or CR933736.12), Rous sarcoma virus (RSV) (Liu et al. (2007) Exp. Mol. Med. 39 (2): 170-175; Accession No. M77786.1), (GFAP) (Liu et al. (2007) Exp. Mol. Med. 39 (2): 170-175; Stone et al. (2005) Mol. Ther. 11 (6): 843-848; Accession No. NG_008401.1 or M67446.1), hAAT (Van Linthout et al., Human Gene Ther. 13 (7): 829-840, 2002; Cunningham et al., Mol. Ther. 16 (6): 1081-1088, 2008), and a CBA hybrid (CBh) (Gray et al. (2011) Hum. Gen. Therapy 22:1143-1153; Accession No. KF926476.1 or KC152483.1). Additional examples of promoters are known in the art. See, e.g., Lodish, Molecular Cell Biology, Freeman and Company, New York 2007. In some aspects, the promoter is the CMV immediate early promoter.

[0215] In some aspects, the promoter is a CAG promoter or a CAG/CBA promoter. In some aspects, a vector or construct of the present disclosure comprises a CAG promoter.

[0216] In some aspects, a CAG promoter comprises, in order from 5′ to 3′, the nucleotide sequences of SEQ ID NOs: 98, 99, and 100.

[0217] In some aspects, the CAG promoter comprises a CMV early enhancer element, a chicken beta actin (CBA) gene sequence, and a chimeric intron/3′ splice sequence from the rabbit beta globin gene.

[0218] In some aspects, the CMV early enhancer element comprises a sequence with at least 70%, at least 75%, at least 80%, at least 85%, at least 90%, at least 91%, at least 92%, at least 93%, at least 94%, at least 95%, at least 96%, at least 97%, at least 98%, at least 99%, or 100% identity to SEQ ID NO: 98. In some aspects, the CMV early enhancer element has the sequence of SEQ ID NO: 98.

[0219] In some aspects, the CBA gene sequence has a sequence with at least 70%, at least 75%, at least 80%, at least 85%, at least 90%, at least 91%, at least 92%, at least 93%, at least 94%, at least 95%, at least 96%, at least 97%, at least 98%, at least 99%, or 100% identity to SEQ ID NO: 99. In some aspects, the CBA gene sequence has the sequence of SEQ ID NO: 99.

[0220] In some aspects, the chimeric intron/3′ splice sequence form the rabbit beta globin gene has at least 70%, at least 75%, at least 80%, at least 85%, at least 90%, at least 91%, at least 92%, at least 93%, at least 94%, at least 95%, at least 96%, at least 97%, at least 98%, at least 99%, or 100% identity to SEQ ID NO: 100. In some aspects, the chimeric intron/3′ splice sequence form the rabbit beta globin gene has the sequence of SEQ ID NO: 100.

[0221] Examples of constitutive promoters include, without limitation, the CAG promoter, the retroviral Rous sarcoma virus (RSV) LTR promoter, the cytomegalovirus (CMV) promoter (see, e.g., Boshart et al. Cell 41:521-530, 1985), the SV40 promoter, the dihydrofolate reductase promoter, the beta-actin promoter, the phosphoglycerol kinase (PGK) promoter, and the EF1-alpha promoter (Invitrogen).

[0222] Inducible promoters allow regulation of gene expression and can be regulated by exogenously supplied compounds, environmental factors such as temperature, or the presence of a specific physiological state, e.g., acute phase, a particular differentiation state of the cell, or in replicating cells only. Inducible promoters and inducible systems are available from a variety of commercial sources, including, without limitation, Invitrogen, Clontech and Ariad. Many other systems have been described and can be readily selected by one of skill in the art.

[0223] Examples of inducible promoters regulated by exogenously supplied compounds include the zinc-inducible sheep metallothionine (MT) promoter, the dexamethasone (Dex)-inducible mouse mammary tumor virus (MMTV) promoter, the T7 polymerase promoter system (WO 98/10088); the ecdysone insect promoter (No et al. Proc. Natl. Acad. Sci. U.S.A. 93:3346-3351, 1996), the tetracycline-repressible system (Gossen et al. Proc. Natl. Acad. Sci. U.S.A. 89:5547-5551, 1992), the tetracycline-inducible system (Gossen et al. Science 268:1766-1769, 1995, see also Harvey et al. Curr. Opin. Chem. Biol. 2:512-518, 1998), the RU486-inducible system (Wang et al. Nat. Biotech. 15:239-243, 1997) and Wang et al. Gene Ther. 4:432-441, 1997), and the rapamycin-inducible system (Magari et al. J. Clin. Invest. 100:2865-2872, 1997).

[0224] In some aspects, the tissue-specific promoter is active only in the inner ear. In some aspects, the tissue-specific promoter is active only in the cochlea. In some aspects, the tissue-specific promoter is active only in hair cells. In some aspects, the tissue-specific promoter is active only in inner hair cells.

[0225] Exemplary tissue-specific promoters include, but are not limited to the following tissue specific promoters: a liver-specific thyroxin binding globulin (TBG) promoter, an insulin promoter, a glucagon promoter, a somatostatin promoter, a pancreatic polypeptide (PPY) promoter, a synapsin-1 (Syn) promoter (Kugler et al., Virology 311:89-95, 2003; Hioki et al., Gene Ther. 14:872-882, 2007; Kuroda et al., J. Gene Med. 10:1163-1175, 2008), a creatine kinase (MCK) promoter (Wang et al., Gene Ther. 15:1489-1499, 2008; Talbot et al., Mol. Ther. 18:601-608, 2010; Katwal et al., Gene Ther. 20 (9): 930-938, 2013), a mammalian desmin (DES) promoter (Talbot et al., Mol. Ther. 18:601-608, 2010), a C5-12 promoter (Wang et al., Gene Ther. 15:1489-1499, 2008), an α-myosin heavy chain (a-MHC) promoter, a PDGF promoter (Patterna, Gene Ther. 7 (15): 1304-1311, 2000; Hioki et al., Gene Ther. 14:872-882, 2007), MecP2 promoter (Rastegar et al., PLOS One 4: e6810, 2009; Gray et al., Human Gene Ther. 22:1143-1153, 2011), CaMKII promoter (Hioki et al., Gene Ther. 14:872-882, 2007; Kuroda et al., J. Gene Med. 10:1163-1175, 2008), mGluR2 promoter (Brene et al., Eur. J. Eurosci. 12:1525-1533, 2000; Kuroda et al., J. Gene Med. 10:1163-1175, 2008), NFL promoter (Xu et al., Human Gene Ther. 12 (5): 563-573, 2001; Xu et al., Gene Ther. 8:1323-1332, 2001), NFH promoter (Xu et al., Human Gene Ther. 12 (5): 563-573, 2001; Xu et al., Gene Ther. 8:1323-1332, 2001), nε2 promoter (Xu et al., Human Gene Ther. 12 (5): 563-573, 2001; Xu et al., Gene Ther. 8:1323-1332, 2001), PPE promoter (Xu et al., Human Gene Ther. 12 (5): 563-573, 2001; Xu et al., Gene Ther. 8:1323-1332, 2001), Enk promoter (Xu et al., Human Gene Ther. 12 (5): 563-573, 2001; Xu et al., Gene Ther. 8:1323-1332, 2001), EAAT2 promoter (Su et al., Proc. Natl. Acad. Sci. U.S.A. 100:1955-1960, 2003; Kuroda et al., J. Gene Med. 10:1163-1175, 2008), GFAP promoter (Brenner et al., J. Neurosci. 14:1030-1037, 1994; Xu et al., Human Gene Ther. 12 (5): 563-573, 2001; Xu et al., Gene Ther. 8:1323-1332, 2001; Lee et al., Glia 56:481-493, 2008; Dirren et al., Human Gene Ther. 25:109-120, 2014), MBP promoter (Chen et al., Gene Ther. 5 (1): 50-58, 1998), or a cardiac Troponin T (cTnT) promoter. Other exemplary promoters include Beta-actin promoter, hepatitis B virus core promoter, Sandig et al., Gene Ther., 3:1002-9 (1996); alpha-fetoprotein (AFP) promoter, Arbuthnot et al., Hum. Gene Ther., 7:1503-14 (1996)), bone osteocalcin promoter (Stein et al., Mol. Biol. Rep., 24:185-96 (1997)); bone sialoprotein promoter (Chen et al., J. Bone Miner. Res., 11:654-64 (1996)), CD2 promoter (Hansal et al., J. Immunol., 161:1063-8 (1998); immunoglobulin heavy chain promoter; T cell receptor.alpha.-chain promoter, neuronal such as neuron-specific enolase (NSE) promoter (Andersen et al., Cell. Mol. Neurobiol., 13:503-15 (1993); Xu et al., Human Gene Ther. 12 (5): 563-573, 2001; Xu et al., Gene Ther. 8:1323-1332, 2001), neurofilament light-chain gene promoter (Piccioli et al., Proc. Natl. Acad. Sci. USA, 88:5611-5 (1991)), and the neuron-specific vgf gene promoter (Piccioli et al., Neuron, 15:373-84 (1995)), among others which will be apparent to the skilled artisan.

[0226] In some aspects, the regulatory sequences impart tissue-specific gene expression capabilities. In some cases, the tissue-specific regulatory sequences bind tissue-specific transcription factors that induce transcription in a tissue-specific manner.

[0227] In some aspects, the tissue-specific promoter is a cochlea-specific promoter. In some aspects, the tissue-specific promoter is a cochlear hair cell-specific promoter. Non-limiting examples of cochlear hair cell-specific promoters include but are not limited to: a ATOH1 promoter, a POU4F3 promoter, a LHX3 promoter, a MYO7A promoter, a MYO6 promoter, a α9ACHR promoter, and a α10ACHR promoter.

[0228] In another aspect, the native promoter for the transgene will be used. The native promoter may be preferred when it is desired that expression of the transgene should mimic the native expression. The native promoter may be used when expression of the transgene must be regulated temporally or developmentally, or in a tissue-specific manner, or in response to specific transcriptional stimuli. In a further aspect, other native expression control elements, such as enhancer elements, polyadenylation sites or Kozak consensus sequences may also be used to mimic the native expression.

### Enhancers

[0229] In some instances, a vector can include a promoter sequence and/or an enhancer sequence. The term “enhancer” refers to a nucleotide sequence that can increase the level of transcription of a nucleic acid encoding a protein of interest (e.g., an otoferlin protein). Enhancer sequences (50-1500 base pairs in length) generally increase the level of transcription by providing additional binding sites for transcription-associated proteins (e.g., transcription factors). In some aspects, an enhancer sequence is found within an intronic sequence. Unlike promoter sequences, enhancer sequences can act at much larger distance away from the transcription start site (e.g., as compared to a promoter). Non-limiting examples of enhancers include a RSV enhancer, a CMV enhancer, and a SV40 enhancer. An example of a CMV enhancer is described in, e.g., Boshart et al., Cell 41(2): 521-530, 1985.

[0230] In some aspects, the enhancer is a CMV early enhancer. In some aspects, the CMV early enhancer element comprises a sequence with at least 70%, at least 75%, at least 80%, at least 85%, at least 90%, at least 91%, at least 92%, at least 93%, at least 94%, at least 95%, at least 96%, at least 97%, at least 98%, at least 99%, or 100% identity to SEQ ID NO: 98. In some aspects, the CMV early enhancer has the sequence of SEQ ID NO: 98.

### Poly(A) Sequences

[0231] In some aspects, any of the vectors provided herein can include a poly(A) sequence. Most nascent eukaryotic mRNAs possess a poly(A) tail at their 3′ end which is added during a complex process that includes cleavage of the primary transcript and a coupled polyadenylation reaction (see, e.g., Proudfoot et al., Cell 108:501-512, 2002). The poly(A) tail confers mRNA stability and transferability (Molecular Biology of the Cell, Third Edition by B. Alberts et al., Garland Publishing, 1994). In some aspects, the poly(A) sequence is positioned 3′ to the nucleic acid sequence encoding the C-terminus of the otoferlin protein.

[0232] Poly(A) sequences can be modified chemically or enzymatically to modulate mRNA functionality such as localization, stability or efficiency of translation.

[0233] There are several poly(A) signal sequences that can be used, including those derived from bovine growth hormone (bgh) (Woychik et al., Proc. Natl. Acad. Sci. U.S.A. 81 (13): 3944-3948, 1984; U.S. Pat. No. 5,122,458; Yew et al., Human Gene Ther. 8 (5): 575-584, 1997; Xu et al., Human Gene Ther. 12 (5): 563-573, 2001; Xu et al., Gene Ther. 8:1323-1332, 2001; Wu et al., Mol. Ther. 16 (2): 280-289, 2008; Gray et al., Human Gene Ther. 22:1143-1153, 2011; Choi et al., Mol. Brain 7:17, 2014), mouse-β-globin, mouse-α-globin (Orkin et al., EMBO J. 4 (2): 453-456, 1985; Thein et al., Blood 71 (2): 313-319, 1988), human collagen, polyoma virus (Batt et al., Mol. Cell Biol. 15 (9): 4783-4790, 1995), the Herpes simplex virus thymidine kinase gene (HSV TK), IgG heavy-chain gene polyadenylation signal (US 2006/0040354), human growth hormone (hGH) (Szymanski et al., Mol. Therapy 15 (7): 1340-1347, 2007; Ostegaard et al., Proc. Natl. Acad. Sci. U.S.A. 102 (8): 2952-2957, 2005), synthetic polyA (Levitt et al., Genes Dev. 3 (7): 1019-1025, 1989; Yew et al., Human Gene Ther. 8 (5): 575-584, 1997; Ostegaard et al., Proc. Natl. Acad. Sci. U.S.A. 102 (8): 2952-2957, 2005; Choi et al., Mol. Brain 7:17, 2014), HIV-1 upstream poly(A) enhancer (Schambach et al., Mol. Ther. 15 (6): 1167-1173, 2007), adenovirus (L3) upstream poly(A) enhancer (Schambach et al., Mol. Ther. 15 (6): 1167-1173, 2007), hTHGB upstream poly(A) enhancer (Schambach et al., Mol. Ther. 15 (6): 1167-1173, 2007), hC2 upstream poly(A) enhancer (Schambach et al., Mol. Ther. 15 (6): 1167-1173, 2007), the group consisting of SV40 poly(A) signal sequence, such as the SV40 late and early poly(A) signal sequence (Schek et al., Mol. Cell Biol. 12 (12): 5386-5393, 1992; Choi et al., Mol. Brain 7:17, 2014; Schambach et al., Mol. Ther. 15 (6): 1167-1173, 2007). In some aspects, the polyA sequence has at least 70%, at least 75%, at least 80%, at least 85%, at least 90%, at least 91%, at least 92%, at least 93%, at least 94%, at least 95%, at least 96%, at least 97%, at least 98%, at least 99%, or 100% identity to SEQ ID NO: 68. In some aspects, the polyA sequence has at least 70%, at least 75%, at least 80%, at least 85%, at least 90%, at least 91%, at least 92%, at least 93%, at least 94%, at least 95%, at least 96%, at least 97%, at least 98%, at least 99%, or 100% identity to SEQ ID NO: 76. In some aspects, the polyA sequence has at least 70%, at least 75%, at least 80%, at least 85%, at least 90%, at least 91%, at least 92%, at least 93%, at least 94%, at least 95%, at least 96%, at least 97%, at least 98%, at least 99%, or 100% identity to SEQ ID NO: 77. A non-limiting example of a poly(A) signal sequence is SEQ ID NO: 68, 76, or 77.

[0234] The poly(A) signal sequence can be the sequence AATAAA. The AATAAA sequence may be substituted with other hexanucleotide sequences with homology to AATAAA which are capable of signaling polyadenylation, including ATTAAA, AGTAAA, CATAAA, TATAAA, GATAAA, ACTAAA, AATATA, AAGAAA, AATAAT, AAAAAA, AATGAA, AATCAA, AACAAA, AATCAA, AATAAC, AATAGA, AATTAA, or AATAAG (see, e.g., WO 06/12414).

[0235] In some aspects, the poly(A) signal sequence can be a synthetic polyadenylation site (see, e.g., the pCl-neo expression vector of Promega which is based on Levitt el al, Genes Dev. 3 (7): 1019-1025, 1989). In some aspects, the poly(A) signal sequence is the polyadenylation signal of soluble neuropilin-1 (sNRP) (AAATAAAATACGAAATG) (see, e.g., WO 05/073384).

[0236] In some aspects, a poly(A) sequence is a bovine growth hormone poly(A) sequence. In some aspects, the polyA sequence has at least 70%, at least 75%, at least 80%, at least 85%, at least 90%, at least 91%, at least 92%, at least 93%, at least 94%, at least 95%, at least 96%, at least 97%, at least 98%, at least 99%, or 100% identity to SEQ ID NO: 108. In some such aspects, a bGH poly(A) sequence comprises or is the sequence of SEQ ID NO: 108. In some aspects, a vector or construct of the present disclosure comprises a boving growth hormone poly A sequence represented by SEQ ID NO: 108. Additional examples of poly(A) signal sequences are known in the art.

### Flanking Regions Untranslated Regions (UTRs)

[0237] In some aspects, any of the vectors described herein (e.g., any of the at least two different vectors) can include an untranslated region. In some aspects, a vector can includes a 5′ UTR or a 3′ UTR.

[0238] Untranslated regions (UTRs) of a gene are transcribed but not translated. The 5′ UTR starts at the transcription start site and continues to the start codon but does not include the start codon. The 3′ UTR starts immediately following the stop codon and continues until the transcriptional termination signal. There is growing body of evidence about the regulatory roles played by the UTRs in terms of stability of the nucleic acid molecule and translation. The regulatory features of a UTR can be incorporated into any of the vectors, compositions, kits, or methods as described herein to enhance the stability of an otoferlin protein.

### Splice Donor and Splice Acceptor Sequences

[0239] In other aspects, non-UTR sequences may be incorporated into 5′ or 3′ UTRs. In some aspects, introns or portions of intron sequences may be incorporated into the flanking regions of the polynucleotides in any of the vectors, compositions, kits, and methods provided herein. Incorporation of intronic sequences may increase protein production as well as mRNA levels. An intron can be an intron from an otoferlin gene or can be an intron from a heterologous gene, e.g., a hybrid adenovirus/mouse immunoglobulin intron (Yew et al., Human Gene Ter. 8 (5): 575-584, 1997), an SV40 intron (Ostedgaard et al., Proc. Natl. Acad. Sci. U.S.A. 102 (8): 2952-2957, 2005), an MVM intron (Wu et al., Mol. Ther. 16 (2): 280-289, 2008), a factor IX truncated intron 1 (Wu et al., Mol. Ther. 16 (2): 280-289, 2008; Kurachi et al., J. Biol. Chem. 270 (10): 5276-5281, 1995), a chimeric 0-globulin splice donor/immunoglobulin heavy chain splice acceptor intron (Wu et al., Mol. Ther. 16 (2): 280-289, 2008; Choi et al., Mol. Brain 7:17, 2014), SV40 late splice donor/splice acceptor intron (19S/16S) (Yew et al., Human Gene Ther. 8 (5): 575-584, 1997), hybrid adenovirus spice donor/IgG splice acceptor (Choi et al., Mol. Brain 7:17, 1991; Huang and Gorman, Mol. Cell Biol. 10 (4): 1805-1810, 1990).

[0240] In some aspects, the splice donor has a sequence with at least 70%, at least 75%, at least 80%, at least 85%, at least 90%, at least 91%, at least 92%, at least 93%, at least 94%, at least 95%, at least 96%, at least 97%, at least 98%, at least 99%, or 100% identity to SEQ ID NO: 64. In some aspects, the splice donor has a sequence with at least 70%, at least 75%, at least 80%, at least 85%, at least 90%, at least 91%, at least 92%, at least 93%, at least 94%, at least 95%, at least 96%, at least 97%, at least 98%, at least 99%, or 100% identity to SEQ ID NO: 72. In some aspects, the splice donor has a sequence with at least 70%, at least 75%, at least 80%, at least 85%, at least 90%, at least 91%, at least 92%, at least 93%, at least 94%, at least 95%, at least 96%, at least 97%, at least 98%, at least 99%, or 100% identity to SEQ ID NO: 74. In some aspects, the splice donor has a sequence with at least 70%, at least 75%, at least 80%, at least 85%, at least 90%, at least 91%, at least 92%, at least 93%, at least 94%, at least 95%, at least 96%, at least 97%, at least 98%, at least 99%, or 100% identity to SEQ ID NO: 102. In some aspects, the splice donor has the sequence of SEQ ID NO: 102.

[0241] In some aspects, the splice acceptor has a sequence with at least 70%, at least 75%, at least 80%, at least 85%, at least 90%, at least 91%, at least 92%, at least 93%, at least 94%, at least 95%, at least 96%, at least 97%, at least 98%, at least 99%, or 100% identity to SEQ ID NO: 65. In some aspects, the splice acceptor has a sequence with at least 70%, at least 75%, at least 80%, at least 85%, at least 90%, at least 91%, at least 92%, at least 93%, at least 94%, at least 95%, at least 96%, at least 97%, at least 98%, at least 99%, or 100% identity to SEQ ID NO: 73. In some aspects, the splice acceptor has a sequence with at least 70%, at least 75%, at least 80%, at least 85%, at least 90%, at least 91%, at least 92%, at least 93%, at least 94%, at least 95%, at least 96%, at least 97%, at least 98%, at least 99%, or 100% identity to SEQ ID NO: 75. In some aspects, the splice acceptor has a sequence with at least 70%, at least 75%, at least 80%, at least 85%, at least 90%, at least 91%, at least 92%, at least 93%, at least 94%, at least 95%, at least 96%, at least 97%, at least 98%, at least 99%, or 100% identity to SEQ ID NO: 106. In some aspects, the splice acceptor has the sequence of SEQ ID NO: 106.

[0242] Non-limiting examples of a splice donor and splice acceptor sequences are SEQ ID NOs: 64 and 65, respectively; SEQ ID NOs: 72 and 73, respectively; SEQ ID NOs: 74 and 75, respectively, and SEQ ID NOs: 102 and 106, respectively.

[0243] In some aspects, the splice donor sequence has the sequence of SEQ ID NO: 102. In some aspects, a vector of construct of the present disclosure comprises a splice donor sequence of SEQ ID NO: 102. In some such aspects, the vector or construct comprising a splice donor sequence (e.g., SEQ ID NO: 102) also comprises a 5′ portion of the OTOF gene or OTOF cDNA (e.g., SEQ ID NO: 101) upstream of the splice donor sequence.

[0244] In some aspects, the first rAAV vector comprises a splice donor sequence with at least 70%, at least 75%, at least 80%, at least 85%, at least 90%, at least 91%, at least 92%, at least 93%, at least 94%, at least 95%, at least 96%, at least 97%, at least 98%, at least 99%, or 100% identity to SEQ ID NO: 102. In some aspects, the first rAAV vector comprises a first expression cassette comprising a splice donor sequence with at least 70%, at least 75%, at least 80%, at least 85%, at least 90%, at least 91%, at least 92%, at least 93%, at least 94%, at least 95%, at least 96%, at least 97%, at least 98%, at least 99%, or 100% identity to SEQ ID NO: 102.

[0245] In some aspects, the first rAAV vector genome comprises a splice donor sequence with at least 70%, at least 75%, at least 80%, at least 85%, at least 90%, at least 91%, at least 92%, at least 93%, at least 94%, at least 95%, at least 96%, at least 97%, at least 98%, at least 99%, or 100% identity to SEQ ID NO: 102. In some aspects, the first rAAV vector genome comprises a first expression cassette comprising a splice donor sequence with at least 70%, at least 75%, at least 80%, at least 85%, at least 90%, at least 91%, at least 92%, at least 93%, at least 94%, at least 95%, at least 96%, at least 97%, at least 98%, at least 99%, or 100% identity to SEQ ID NO: 102. In some aspects, the splice donor has the sequence of SEQ ID NO: 102.

[0246] In some aspects, the splice acceptor sequence has the sequence of SEQ ID NO: 106. In some aspects, a vector or construct of the present disclosure comprises a splice acceptor sequence of SEQ ID NO: 106. In some such aspects, the vector or construct comprising a splice acceptor sequence (e.g., SEQ ID NO: 106) also comprises a 3′ portion of the OTOF gene or OTOF cDNA (e.g., SEQ ID NO: 107) downstream of the splice acceptor sequence.

[0247] In some aspects, the second rAAV vector comprises a splice acceptor sequence with at least 70%, at least 75%, at least 80%, at least 85%, at least 90%, at least 91%, at least 92%, at least 93%, at least 94%, at least 95%, at least 96%, at least 97%, at least 98%, at least 99%, or 100% identity to SEQ ID NO: 106. In some aspects, the second rAAV vector comprises a second expression cassette comprising a splice acceptor sequence with at least 70%, at least 75%, at least 80%, at least 85%, at least 90%, at least 91%, at least 92%, at least 93%, at least 94%, at least 95%, at least 96%, at least 97%, at least 98%, at least 99%, or 100% identity to SEQ ID NO: 106.

[0248] In some aspects, the second rAAV vector genome comprises a splice acceptor sequence with at least 70%, at least 75%, at least 80%, at least 85%, at least 90%, at least 91%, at least 92%, at least 93%, at least 94%, at least 95%, at least 96%, at least 97%, at least 98%, at least 99%, or 100% identity to SEQ ID NO: 106. In some aspects, the second rAAV vector genome comprises a second expression cassette comprising a splice acceptor sequence with at least 70%, at least 75%, at least 80%, at least 85%, at least 90%, at least 91%, at least 92%, at least 93%, at least 94%, at least 95%, at least 96%, at least 97%, at least 98%, at least 99%, or 100% identity to SEQ ID NO: 106. In some aspects, the splice acceptor has the sequence of SEQ ID NO: 106.

### Recombinogenic Sequences

[0249] In some aspects, the vectors or constructs of the present disclosure comprise(s) one or more recombinogenic sequences. In some aspects, a recombinogenic sequence is or comprises a portion of a gene sequence. In some aspects, a recombinogenic sequence is derived from an alkaline phosphatase gene. In some aspects, a recombinogenic sequence is derived from an F1 phage. In some such aspects, a recombinogenic sequence is an AK sequence derived from an F1 phage.

[0250] In some aspects, the AK recombinogenic sequence has a sequence with at least 70%, at least 75%, at least 80%, at least 85%, at least 90%, at least 91%, at least 92%, at least 93%, at least 94%, at least 95%, at least 96%, at least 97%, at least 98%, at least 99%, or 100% identity to SEQ ID NO: 103. In some aspects, the AK recombinogenic sequence is SEQ ID NO: 103. In some aspects of a dual vector system of the present disclosure, each of two vectors comprises a recombinogenic sequence.

[0251] In some aspects, the first rAAV vector comprises an AK recombinogenic sequence has a sequence with at least 70%, at least 75%, at least 80%, at least 85%, at least 90%, at least 91%, at least 92%, at least 93%, at least 94%, at least 95%, at least 96%, at least 97%, at least 98%, at least 99%, or 100% identity to SEQ ID NO: 103. In some aspects, the first rAAV vector comprises an expression cassette comprising an AK recombinogenic sequence has a sequence with at least 70%, at least 75%, at least 80%, at least 85%, at least 90%, at least 91%, at least 92%, at least 93%, at least 94%, at least 95%, at least 96%, at least 97%, at least 98%, at least 99%, or 100% identity to SEQ ID NO: 103. In some aspects, the AK recombinogenic sequence has the sequence of SEQ ID NO: 103.

[0252] In some aspects, the first rAAV vector genome comprises an AK recombinogenic sequence has a sequence with at least 70%, at least 75%, at least 80%, at least 85%, at least 90%, at least 91%, at least 92%, at least 93%, at least 94%, at least 95%, at least 96%, at least 97%, at least 98%, at least 99%, or 100% identity to SEQ ID NO: 103. In some aspects, the first rAAV vector genome comprises an expression cassette comprising an AK recombinogenic sequence has a sequence with at least 70%, at least 75%, at least 80%, at least 85%, at least 90%, at least 91%, at least 92%, at least 93%, at least 94%, at least 95%, at least 96%, at least 97%, at least 98%, at least 99%, or 100% identity to SEQ ID NO: 103. In some aspects, the AK recombinogenic sequence has the sequence of SEQ ID NO: 103.

### Additional Sequences

[0253] In addition to the major elements identified above for the recombinant AAV vector, the vector also includes conventional control elements that are operably linked to the transgene in a manner which permits its transcription, translation and/or expression in a cell transfected with the plasmid vector or infected with the virus produced by the disclosure.

[0254] Any of the vectors provided herein can optionally include additional nucleotide sequences (“a stuffer sequence”) in order to optimize the total number of base pairs in the vector.

[0255] In some aspects, the stuffer sequence has at least 70%, at least 75%, at least 80%, at least 85%, at least 90%, at least 91%, at least 92%, at least 93%, at least 94%, at least 95%, at least 96%, at least 97%, at least 98%, at least 99%, or 100% identity to SEQ ID NO: 54. In some aspects, the stuffer sequence has at least 70%, at least 75%, at least 80%, at least 85%, at least 90%, at least 91%, at least 92%, at least 93%, at least 94%, at least 95%, at least 96%, at least 97%, at least 98%, at least 99%, or 100% identity to SEQ ID NO: 55. In some aspects, the stuffer sequence has at least 70%, at least 75%, at least 80%, at least 85%, at least 90%, at least 91%, at least 92%, at least 93%, at least 94%, at least 95%, at least 96%, at least 97%, at least 98%, at least 99%, or 100% identity to SEQ ID NO: 56. In some aspects, the stuffer sequence has at least 70%, at least 75%, at least 80%, at least 85%, at least 90%, at least 91%, at least 92%, at least 93%, at least 94%, at least 95%, at least 96%, at least 97%, at least 98%, at least 99%, or 100% identity to SEQ ID NO: 57. In some aspects, the stuffer sequence has at least 70%, at least 75%, at least 80%, at least 85%, at least 90%, at least 91%, at least 92%, at least 93%, at least 94%, at least 95%, at least 96%, at least 97%, at least 98%, at least 99%, or 100% identity to SEQ ID NO: 58. In some aspects, the stuffer sequence has at least 70%, at least 75%, at least 80%, at least 85%, at least 90%, at least 91%, at least 92%, at least 93%, at least 94%, at least 95%, at least 96%, at least 97%, at least 98%, at least 99%, or 100% identity to SEQ ID NO: 90. In some aspects, the stuffer sequence has at least 70%, at least 75%, at least 80%, at least 85%, at least 90%, at least 91%, at least 92%, at least 93%, at least 94%, at least 95%, at least 96%, at least 97%, at least 98%, at least 99%, or 100% identity to SEQ ID NO: 91. SEQ ID NOs. 54-58, 90 and 91 are exemplary human factor VIII stuffer sequences that can be used in any of the vectors described herein. Additional stuffer sequences are known in the art.

### Capsids

[0256] In some aspects, the recombinant AAV vectors of the present disclosure are packaged into a capsid of the AAV2, 3, 4, 5, 6, 7, 8, 9, 10, rh8, rh10, rh39, rh43 or Anc80 serotype or one or more hybrids thereof. In some aspects, a capsid is from an ancestral serotype. For example, in some aspects, the capsid is an Anc80 capsid (e.g., an Anc80L65 capsid).

[0257] In some aspects, the capsid comprises a polypeptide with at least 70%, at least 75%, at least 80%, at least 85%, at least 90%, at least 91%, at least 92%, at least 93%, at least 94%, at least 95%, at least 96%, at least 97%, at least 98%, at least 99%, or 100% identity to the polypeptide of SEQ ID NO: 109. In some aspects, the capsid comprises a polypeptide represented by SEQ ID NO: 109.

[0258] Any combination of ITRs and capsids may be used in recombinant AAV vectors of the present disclosure, for example, wild-type or variant AAV2 ITRs and Anc80 capsid, wild-type or variant AAV2 ITRs and AAV6 capsid, etc. In some aspects of the present disclosure an rAAV particle is an rAAV2/Anc80 particle which comprises an Anc80 capsid (e.g., comprising a polypeptide of SEQ ID NO: 109) that encapsidates a nucleic acid vector with wild-type AAV2 ITRs (e.g., SEQ ID NOs: 97 and 104) flanking a portion of a transgene and/or construct comprising a portion of OTOF (e.g., SEQ ID NO: 101 or 107).

[0259] In some aspects, the first and second rAAV vectors are encapsulated by an AAV capsid. In some aspects, the AAV capsid encapsulating the first rAAV vector is a serotype selected from any one of AAV1, AAV2, AAV3, AAV4, AAV5, AAV6, AAV7, AAV8, AAV9, AAVrh8, AAVrh10, AAVrh39, AAVrh43, or Anc80. In some aspects, the AAV capsid encapsulating the second rAAV vector is a serotype selected from any one of AAV1, AAV2, AAV3, AAV4, AAV5, AAV6, AAV7, AAV8, AAV9, AAVrh8, AAVrh10, AAVrh39, AAVrh43, or Anc80. In some aspects, the first rAAV vector is encapsulated by an Anc80 capsid and the second rAAV vector is encapsulated by an Anc80 capsid.

[0260] In some aspects, the first and second rAAV vector genomes are encapsulated by an AAV capsid. In some aspects, the AAV capsid encapsulating the first rAAV vector genome is a serotype selected from any one of AAV1, AAV2, AAV3, AAV4, AAV5, AAV6, AAV7, AAV8, AAV9, AAVrh8, AAVrh10, AAVrh39, AAVrh43, or Anc80. In some aspects, the AAV capsid encapsulating the second rAAV vector genome is a serotype selected from any one of AAV1, AAV2, AAV3, AAV4, AAV5, AAV6, AAV7, AAV8, AAV9, AAVrh8, AAVrh10, AAVrh39, AAVrh43, or Anc80. In some aspects, the first rAAV vector genome is encapsulated by an Anc80 capsid and the second rAAV vector genome is encapsulated by an Anc80 capsid.

[0261] In some aspects, the Anc80 capsid comprises an amino acid sequence having at least 70%, at least 75%, at least 80%, at least 85%, at least 90%, at least 91%, at least 92%, at least 93%, at least 94%, at least 95%, at least 96%, at least 97%, at least 98%, at least 99%, or 100% identity to SEQ ID NO: 109. In some aspects, the Anc80 capsid comprises a polypeptide of SEQ ID NO: 109.

[0262] In some aspects, the first recombinant AAV particle comprises a nucleic acid sequence having at least 70%, at least 75%, at least 80%, at least 85%, at least 90%, at least 91%, at least 92%, at least 93%, at least 94%, at least 95%, at least 96%, at least 97%, at least 98%, at least 99%, or 100% identity to SEQ ID NO: 96. In some aspects, the first recombinant AAV particle comprises a nucleic acid sequence having the sequence of SEQ ID NO: 96.

[0263] In some aspects, the second recombinant AAV particle comprises a nucleic acid sequence having at least 70%, at least 75%, at least 80%, at least 85%, at least 90%, at least 91%, at least 92%, at least 93%, at least 94%, at least 95%, at least 96%, at least 97%, at least 98%, at least 99%, or 100% identity to SEQ ID NO: 105. In some aspects, the second recombinant AAV particle comprises a nucleic acid sequence having the sequence of SEQ ID NO: 105.

### Vectors

[0264] Provided herein are compositions of matter and methods of use for the treatment of hearing loss, using nucleic acid therapeutics such as auditory polypeptide messenger RNAs (e.g., otoferlin gene). In some aspects, the auditory polypeptide nucleic acids (e.g., otoferlin gene) are present in viral vectors, such as adeno-associated viral vectors, adenoviral vectors, lentiviral vectors, and retroviral vectors. In some aspects, the vectors are adeno-associated viral vectors. In some aspects, the vectors are recombinant adeno-associated viral vectors.

[0265] The foregoing methods for packaging recombinant vectors in desired AAV capsids to produce the rAAVs (or rAAV particles) of the disclosure are not meant to be limiting and other suitable methods will be apparent to the skilled artisan.

### Recombinant AAV Vectors

[0266] In some aspects, the viral vector is an adeno-associated virus (AAV) vector. In some aspects, the viral vector is a recombinant adeno-associated virus (rAAV) vector. “Recombinant AAV vectors” or “rAAVs” of the disclosure comprise at a minimum, a transgene or a portion thereof and a regulatory sequence (e.g., a promoter), and 5′ and 3′ AAV inverted terminal repeats (ITRs). It is this recombinant AAV vector which is packaged into a capsid protein and delivered to a selected target cell. In some aspects, the transgene is a nucleic acid sequence, heterologous to the vector sequences, which encodes a polypeptide, protein, functional RNA molecule (e.g., miRNA, miRNA inhibitor) or other gene product, of interest. The nucleic acid coding sequence is operatively linked to regulatory components in a manner which permits transgene transcription, translation, and/or expression in a cell of a target tissue.

[0267] Such a recombinant AAV vector is packaged into a capsid to form an rAAV particle and delivered to a selected target cell (e.g., an inner hair cell). In some aspects, one or more recombinant AAV vectors of the present disclosure is packaged into a capsid of the AAV2, 3, 4, 5, 6, 7, 8, 9, 10, rh8, rh10, rh39, rh43 or Anc80 serotype or one or more hybrids thereof.

[0268] In some aspects, an rAAV of the disclosure is encapsidated by an Anc80 capsid. In some aspects, the Anc80 capsid comprises an amino acid sequence having at least 70%, at least 75%, at least 80%, at least 85%, at least 90%, at least 91%, at least 92%, at least 93%, at least 94%, at least 95%, at least 96%, at least 97%, at least 98%, at least 99%, or 100% identity to SEQ ID NO: 109. In some aspects, the Anc80 capsid comprises a polypeptide of SEQ ID NO: 109.

[0269] In some aspects of any of the compositions described herein, the first vector includes an ITR (e.g., any of the exemplary ITR sequences described herein), a promoter and/or enhancer (e.g., any of the exemplary enhancers and any of the exemplary promoters described herein), a sequence encoding a first, N-terminal portion of a human otoferlin protein (e.g., any of the exemplary sequences encoding a first, N-terminal portion of a human otoferlin protein described herein), a splicing donor site (e.g., any of the exemplary splicing donor sites described herein), an AK sequence (e.g., any of the exemplary AK sequences described herein), and an ITR (e.g., any of the exemplary ITR sequences described herein).

[0270] In some aspects of any of the compositions described herein, the second vector includes an ITR sequence (e.g., any of the exemplary ITR sequences described herein), an AK sequence (e.g., any of the exemplary AK sequences described herein), a splicing acceptor sequence (e.g., any of the splicing acceptor sequences described herein), a sequence encoding a second portion of a human otoferlin protein (e.g., any of the exemplary sequences encoding a second, C-terminal portion of a human otoferlin protein described herein), a poly(A) signal sequence (e.g., any of the exemplary poly(A) signal sequences described herein), and an ITR sequence (e.g., any of the exemplary ITR sequences described herein).

[0271] The vectors provided herein can be of different sizes. The choice of vector that is used in any of the compositions, kits, and methods described herein may depend on the size of the vector. In some aspects, the vector(s) is an adeno-associated virus (AAV vector) and can include a total number of nucleotides of up to 5 kb. In some aspects, the AAV vector(s) can include a total number of nucleotides in the range of about 1 kb to about 2 kb, about 1 kb to about 3 kb, about 1 kb to about 4 kb, about 1 kb to about 5 kb, about 2 kb to about 3 kb, about 2 kb to about 4 kb, about 2 kb to about 5 kb, about 3 kb to about 4 kb, about 3 kb to about 5 kb, or about 4 kb to about 5 kb.

[0272] In some aspects of any of the compositions, kits, and methods provided herein, the two different vectors can be substantially the same type of vector and may differ in size. In some aspects, the two different vectors can be different types of vector, and may have substantially the same size or have different sizes.

[0273] A variety of different methods known in the art can be used to introduce any of the vectors disclosed herein into a mammalian cell (e.g., a cochlear inner hair cell). Non-limiting examples of methods for introducing nucleic acid into a mammalian cell include: lipofection, transfection (e.g., calcium phosphate transfection, transfection using highly branched organic compounds, transfection using cationic polymers, dendrimer-based transfection, optical transfection, particle-based transfection (e.g., nanoparticle transfection), or transfection using liposomes (e.g., cationic liposomes)), microinjection, electroporation, cell squeezing, sonoporation, protoplast fusion, impalefection, hydrodynamic delivery, gene gun, magnetofection, viral transfection, and nucleofection.

[0274] Skilled practitioners will appreciate that any of the vectors described herein can be introduced into a mammalian cell by, for example, lipofection.

[0275] Various molecular biology techniques that can be used to introduce a mutation(s) and/or a deletion(s) into an endogenous gene are also known in the art. Non-limiting examples of such techniques include site-directed mutagenesis, CRISPR (e.g., CRISPR/Cas9-induced knock-in mutations and CRISPR/Cas9-induced knock-out mutations), and TALENs. These methods can be used to correct the sequence of a defective endogenous gene present in a chromosome of a target cell.

[0276] In some aspects, a composition of the present disclosure comprises a first rAAV vector comprising a first expression cassette comprising a 5′ inverted terminal repeat, a promoter operably linked to a 5′ portion of the OTOF gene or OTOF cDNA, a splice donor sequence, a AK recombinogenic sequence, and a 3′ inverted terminal repeat.

[0277] In some aspects, a composition of the present disclosure comprises a second rAAV vector comprising a second expression cassette comprising a 5′ inverted terminal repeat, a AK recombinogenic sequence, a splice acceptor sequence, a 3′ portion of the OTOF gene or OTOF cDNA, a polyadenylation sequence, and a 3′ inverted terminal repeat.

[0278] In some aspects, a composition of the present disclosure comprises a first rAAV vector genome comprising a first expression cassette comprising a 5′ inverted terminal repeat, a promoter operably linked to a 5′ portion of the OTOF gene or OTOF cDNA, a splice donor sequence, a AK recombinogenic sequence, and a 3′ inverted terminal repeat.

[0279] In some aspects, a composition of the present disclosure comprises a second rAAV vector genome comprising a second expression cassette comprising a 5′ inverted terminal repeat, a AK recombinogenic sequence, a splice acceptor sequence, a 3′ portion of the OTOF gene or OTOF cDNA, a polyadenylation sequence, and a 3′ inverted terminal repeat.

[0280] In some aspects, a composition of the present disclosure comprises a first rAAV vector comprising a first expression cassette comprising, in 5′ to 3′ orientation, a 5′ inverted terminal repeat, a promoter operably linked to a 5′ portion of the OTOF gene or OTOF cDNA, a splice donor sequence, a AK recombinogenic sequence, and a 3′ inverted terminal repeat.

[0281] In some aspects, a composition of the present disclosure comprises a second rAAV vector comprising a second expression cassette comprising, in 5′ to 3′ orientation, a 5′ inverted terminal repeat, a AK recombinogenic sequence, a splice acceptor sequence, a 3′ portion of the OTOF gene or OTOF cDNA, a polyadenylation sequence, and a 3′ inverted terminal repeat.

[0282] In some aspects, a composition of the present disclosure comprises a first rAAV vector genome comprising a first expression cassette comprising, in 5′ to 3′ orientation, a 5′ inverted terminal repeat, a promoter operably linked to a 5′ portion of the OTOF gene or OTOF cDNA, a splice donor sequence, a AK recombinogenic sequence, and a 3′ inverted terminal repeat.

[0283] In some aspects, a composition of the present disclosure comprises a second rAAV vector genome comprising a second expression cassette comprising, in 5′ to 3′ orientation, a 5′ inverted terminal repeat, a AK recombinogenic sequence, a splice acceptor sequence, a 3′ portion of the OTOF gene or OTOF cDNA, a polyadenylation sequence, and a 3′ inverted terminal repeat.

[0284] In some aspects, a composition of the present disclosure comprises a first rAAV vector comprising a first expression cassette comprising i) a 5′ inverted terminal repeat having the sequence of SEQ ID NO: 97, ii) a promoter having the sequence of SEQ ID NOs: 98, 99, and 100 operably linked to iii) a 5′ portion of the OTOF gene or OTOF cDNA having the sequence of SEQ ID NO: 101, iv) a splice donor sequence having the sequence of SEQ ID NO: 102, v) a AK recombinogenic sequence having the sequence of SEQ ID NO: 103, and vi) a 3′ inverted terminal repeat having the sequence of SEQ ID NO: 104.

[0285] In some aspects, a composition of the present disclosure comprises a second rAAV vector comprising a second expression cassette comprising i) a 5′ inverted terminal repeat having the sequence of SEQ ID NO: 97, ii) a AK recombinogenic sequence having the sequence of SEQ ID NO: 103, iii) a splice acceptor sequence having the sequence of SEQ ID NO: 106, iv) a 3′ portion of the OTOF gene or OTOF cDNA having the sequence of SEQ ID NO: 107, v) a polyadenylation sequence having the sequence of SEQ ID NO: 108, and vi) a 3′ inverted terminal repeat having the sequence of SEQ ID NO: 104.

[0286] In some aspects, a composition of the present disclosure comprises a first rAAV vector genome comprising a first expression cassette comprising i) a 5′ inverted terminal repeat having the sequence of SEQ ID NO: 97, ii) a promoter having the sequence of SEQ ID NOs: 98, 99, and 100 operably linked to iii) a 5′ portion of the OTOF gene or OTOF cDNA having the sequence of SEQ ID NO: 101, iv) a splice donor sequence having the sequence of SEQ ID NO: 102, v) a AK recombinogenic sequence having the sequence of SEQ ID NO: 103, and vi) a 3′ inverted terminal repeat having the sequence of SEQ ID NO: 104.

[0287] In some aspects, a composition of the present disclosure comprises a second rAAV vector genome comprising a second expression cassette comprising i) a 5′ inverted terminal repeat having the sequence of SEQ ID NO: 97, ii) a AK recombinogenic sequence having the sequence of SEQ ID NO: 103, iii) a splice acceptor sequence having the sequence of SEQ ID NO: 106, iv) a 3′ portion of the OTOF gene or OTOF cDNA having the sequence of SEQ ID NO: 107, v) a polyadenylation sequence having the sequence of SEQ ID NO: 108, and vi) a 3′ inverted terminal repeat having the sequence of SEQ ID NO: 104.

[0288] In some aspects, a composition of the present disclosure comprises a first rAAV vector comprising a first expression cassette comprising, in 5′ to 3′ orientation, i) a 5′ inverted terminal repeat having the sequence of SEQ ID NO: 97, ii) a promoter having the sequence of SEQ ID NOs: 98, 99, and 100 operably linked to iii) a 5′ portion of the OTOF gene or OTOF cDNA having the sequence of SEQ ID NO: 101, iv) a splice donor sequence having the sequence of SEQ ID NO: 102, v) a AK recombinogenic sequence having the sequence of SEQ ID NO: 103, and vi) a 3′ inverted terminal repeat having the sequence of SEQ ID NO: 104.

[0289] In some aspects, a composition of the present disclosure comprises a second rAAV vector comprising a second expression cassette comprising, in 5′ to 3′ orientation, i) a 5′ inverted terminal repeat having the sequence of SEQ ID NO: 97, ii) a AK recombinogenic sequence having the sequence of SEQ ID NO: 103, iii) a splice acceptor sequence having the sequence of SEQ ID NO: 106, iv) a 3′ portion of the OTOF gene or OTOF cDNA having the sequence of SEQ ID NO: 107, v) a polyadenylation sequence having the sequence of SEQ ID NO: 108, and vi) a 3′ inverted terminal repeat having the sequence of SEQ ID NO: 104.

[0290] In some aspects, a composition of the present disclosure comprises a first rAAV vector genome comprising a first expression cassette comprising, in 5′ to 3′ orientation, i) a 5′ inverted terminal repeat having the sequence of SEQ ID NO: 97, ii) a promoter having the sequence of SEQ ID NOs: 98, 99, and 100 operably linked to iii) a 5′ portion of the OTOF gene or OTOF cDNA having the sequence of SEQ ID NO: 101, iv) a splice donor sequence having the sequence of SEQ ID NO: 102, v) a AK recombinogenic sequence having the sequence of SEQ ID NO: 103, and vi) a 3′ inverted terminal repeat having the sequence of SEQ ID NO: 104.

[0291] In some aspects, a composition of the present disclosure comprises a second rAAV vector genome comprising a second expression cassette comprising, in 5′ to 3′ orientation, i) a 5′ inverted terminal repeat having the sequence of SEQ ID NO: 97, ii) a AK recombinogenic sequence having the sequence of SEQ ID NO: 103, iii) a splice acceptor sequence having the sequence of SEQ ID NO: 106, iv) a 3′ portion of the OTOF gene or OTOF cDNA having the sequence of SEQ ID NO: 107, v) a polyadenylation sequence having the sequence of SEQ ID NO: 108, and vi) a 3′ inverted terminal repeat having the sequence of SEQ ID NO: 104.

[0292] In some aspects, a composition of the present disclosure comprises a first rAAV vector comprising a first expression cassette the sequence of SEQ ID NO: 96. In some aspects, a composition of the present disclosure comprises a second rAAV vector comprising a second expression cassette comprising the sequence of SEQ ID NO: 105.

[0293] In some aspects, a composition of the present disclosure comprises a first rAAV vector genome comprising a first expression cassette the sequence of SEQ ID NO: 96. In some aspects, a composition of the present disclosure comprises a second rAAV vector genome comprising a second expression cassette comprising the sequence of SEQ ID NO: 105.

[0294] In some aspects, the disclosure provides a composition comprising a) a first recombinant adeno-associated viral (rAAV) vector genome (vg) comprising a first expression cassette comprising a promoter operably linked to nucleic acid sequence comprising a 5′ portion of an otoferlin gene, wherein the expression cassette is flanked by inverted terminal repeats (ITRs); and b) a second rAAV vector genome comprising a second expression cassette comprising a nucleic acid sequence comprising a 3′ portion of an otoferlin gene, wherein the expression cassette is flanked by ITRs; wherein the composition comprises about 4.1E10-8.1E12 total vg.

[0295] In some aspects, the disclosure provides a composition comprising a) a first recombinant adeno-associated viral (rAAV) vector genome (vg) comprising a first expression cassette comprising a promoter operably linked to nucleic acid sequence comprising a 5′ portion of an otoferlin gene, wherein the expression cassette is flanked by inverted terminal repeats (ITRs); and b) a second rAAV vector genome comprising a second expression cassette comprising a nucleic acid sequence comprising a 3′ portion of an otoferlin gene, wherein the expression cassette is flanked by ITRs; wherein the composition comprises about 4.1E10-4.1E12 total vg or about 8.1E10-8.1E12 total vg.

[0296] In some aspects, the composition comprises the first rAAV vector genome and the second rAAV vector genome in about a 1:1 ratio.

[0297] In some aspects, the composition comprises about 4.1E10-8.1E12 total vg. In some aspects, the composition comprises about 4.1E10-4.1E12 total vg or about 8.1E10-8.1E12 total vg.

[0298] In some aspects, the composition comprises about 4.1E10-4.1E12, about 5.1E10-3.1E12, about 6.1E10-2.1E12, about 7.1E10-1.1E12, about 8.1E10-10.1E11, about 9.1E10-9.1E11, about 10.1E11-8.1E11, about 1.1E11-7.1E11, about 2.1E11-6.1E11, or about 3.1E11-5.1E11 total vg. In some aspects, the composition comprises about 3.1E11-5.1E11, about 3.2E11-5.0E11, about 3.3E11-4.9E11, about 3.4E11-4.8E11, about 3.5E11-4.7E11, about 3.6E11-4.6E11, about 3.7E11-4.5E11, about 3.8E11-4.4E11, about 3.9E11-4.3E11, or about 4.0E11-4.2E11 total vg. In some aspects, the composition comprises about 4.1E11 total vg.

[0299] In some aspects, the composition comprises about 4.1E10-8.1E12 total vg/cochlea. In some aspects, the composition comprises about 4.1E10-4.1E12 total vg/cochlea or about 8.1E10-8.1E12 total vg/cochlea.

[0300] In some aspects, the composition comprises about 4.1E10-4.1E12, about 5.1E10-3.1E12, about 6.1E10-2.1E12, about 7.1E10-1.1E12, about 8.1E10-10.1E11, about 9.1E10-9.1E11, about 10.1E11-8.1E11, about 1.1E11-7.1E11, about 2.1E11-6.1E11, or about 3.1E11-5.1E11 total vg/cochlea. In some aspects, the composition comprises about 3.1E11-5.1E11, about 3.2E11-5.0E11, about 3.3E11-4.9E11, about 3.4E11-4.8E11, about 3.5E11-4.7E11, about 3.6E11-4.6E11, about 3.7E11-4.5E11, about 3.8E11-4.4E11, about 3.9E11-4.3E11, or about 4.0E11-4.2E11 total vg/cochlea. In some aspects, the composition comprises about 4.1E11 total vg/cochlea.

[0301] In some aspects, the composition comprises about 3.0E11, about 3.1E11, about 3.2E11, about 3.3E11, about 3.4E11, about 3.5E11, about 3.6E11, about 3.7E11, about 3.8E11, about 3.9E11, about 4.0E11, about 4.1E11, about 4.2E11, about 4.3E11, about 4.4E11, about 4.5E11, about 4.6E11, about 4.7E11, about 4.8E11, about 4.9E11, about 5.0E11, about 5.1E11, about 5.2E11, about 5.3E11, about 5.4E11, about 5.5E11, about 5.6E11, about 5.7E11, about 5.8E11, about 5.9E11, about 6.0E11, about 6.1E11, about 6.2E11, about 6.3E11, about 6.4E11, about 6.5E11, about 6.6E11, about 6.7E11, about 6.8E11, about 6.9E11, about 7.0E11, about 7.1E11, about 7.2E11, about 7.3E11, about 7.4E11, about 7.5E11, about 7.6E11, about 7.7E11, about 7.8E11, about 7.9E11, about 8.0E11, about 8.1E11, about 8.2E11, about 8.3E11, about 8.4E11, about 8.5E11, about 8.6E11, about 8.7E11, about 8.8E11, or about 8.9E11 total vg.

[0302] In some aspects, the composition comprises about 3.0E11, about 3.1E11, about 3.2E11, about 3.3E11, about 3.4E11, about 3.5E11, about 3.6E11, about 3.7E11, about 3.8E11, about 3.9E11, about 4.0E11, about 4.1E11, about 4.2E11, about 4.3E11, about 4.4E11, about 4.5E11, about 4.6E11, about 4.7E11, about 4.8E11, about 4.9E11, about 5.0E11, about 5.1E11, about 5.2E11, about 5.3E11, about 5.4E11, about 5.5E11, about 5.6E11, about 5.7E11, about 5.8E11, about 5.9E11, about 6.0E11, about 6.1E11, about 6.2E11, about 6.3E11, about 6.4E11, about 6.5E11, about 6.6E11, about 6.7E11, about 6.8E11, about 6.9E11, about 7.0E11, about 7.1E11, about 7.2E11, about 7.3E11, about 7.4E11, about 7.5E11, about 7.6E11, about 7.7E11, about 7.8E11, about 7.9E11, about 8.0E11, about 8.1E11, about 8.2E11, about 8.3E11, about 8.4E11, about 8.5E11, about 8.6E11, about 8.7E11, about 8.8E11, or about 8.9E11 total vg/cochlea.

[0303] In some aspects, the composition comprises about 8.1E10-8.1E12, about 9.1E10-7.1E12, about 10.1E10-6.1E12, about 1.1E11-5.1E12, about 2.1E11-4.1E12, about 3.1E11-3.1E12, about 4.1E11-2.1E12, about 5.1E11-1.1E12, about 6.1E11-10.1E11, or about 7.1E11-9.1E11 total vg. In some aspects, the composition comprises about 7.1E11-9.1E11, about 7.2E11-9.0E11, about 7.3E11-8.9E11, about 7.4E11-8.8E11, about 7.5E11-8.7E11, about 7.6E11-8.6E11, about 7.7E11-8.5E11, about 7.8E11-8.4E11, about 7.9E11-8.3E11, or about 8.0E11-8.2E11 total vg. In some aspects, the composition comprises about 8.1E11 total vg.

[0304] In some aspects, the composition comprises about 8.1E10-8.1E12, about 9.1E10-7.1E12, about 10.1E10-6.1E12, about 1.1E11-5.1E12, about 2.1E11-4.1E12, about 3.1E11-3.1E12, about 4.1E11-2.1E12, about 5.1E11-1.1E12, about 6.1E11-10.1E11, or about 7.1E11-9.1E11 total vg/cochlea. In some aspects, the composition comprises about 7.1E11-9.1E11, about 7.2E11-9.0E11, about 7.3E11-8.9E11, about 7.4E11-8.8E11, about 7.5E11-8.7E11, about 7.6E11-8.6E11, about 7.7E11-8.5E11, about 7.8E11-8.4E11, about 7.9E11-8.3E11, or about 8.0E11-8.2E11 total vg/cochlea. In some aspects, the composition comprises about 8.1E11 total vg/cochlea.

[0305] In some aspects, the concentration of the composition comprises about 4.5E11-9E13 total vg/mL. In some aspects, the concentration of the composition comprises about 4.5E11-4.5E13 total vg/mL or about 9E11-9E13 total vg/mL.

[0306] In some aspects, the concentration of the composition comprises about 4.5E11-4.5E13 total vg/mL. In some aspects, the concentration of the composition comprises about 5.5E11-3.5E13, about 6.5E11-2.5E13, about 7.5E11-1.5E13, about 8.5E11-10.5E12, about 9.5E11-9.5E12, about 10.5E11-8.5E12, about 1.5E12-7.5E12, about 2.5E12-6.5E12, or about 3.5E12-5.5E12 total vg/mL. In some aspects, the concentration of the composition comprises about 3.5E12-5.5E12, about 3.6E12-5.4E12, about 3.7E12-5.3E12, about 3.8E12-5.2E12, about 3.9E12-5.1E12, about 4.0E12-5.0E12, about 4.1E12-4.9E12, about 4.2E12-4.8E12, about 4.3E12-4.7E12, or about 4.4E12-4.6E12 total vg/mL. In some aspects, the concentration of the composition comprises about 4.5E12 total vg/mL.

[0307] In some aspects, the concentration of the composition comprises about 3.5E12, about 3.6E12, about 3.7E12, about 3.8E12, about 3.9E12, about 4.0E12, about 4.1E12, about 4.2E12, about 4.3E12, about 4.4E12, about 4.5E12, about 4.6E12, about 4.7E12, about 4.8E12, about 4.9E12, about 5.0E12, about 5.1E12, about 5.2E12, about 5.3E12, about 5.4E12, about 5.5E12, about 5.6E12, about 5.7E12, about 5.8E12, about 5.9E12, about 6.0E12, about 6.1E12, about 6.2E12, about 6.3E12, about 6.4E12, about 6.5E12, about 6.6E12, about 6.7E12, about 6.8E12, about 6.9E12, about 7.0E12, about 7.1E12, about 7.2E12, about 7.3E12, about 7.4E12, about 7.5E12, about 7.6E12, about 7.7E12, about 7.8E12, about 7.9E12, about 8.0E12, about 8.1E12, about 8.2E12, about 8.3E12, about 8.4E12, about 8.5E12, about 8.6E12, about 8.7E12, about 8.8E12, about 8.9E12, about 9.0E12, about 9.1E12, about 9.2E12, about 9.3E12, about 9.4E12, about 9.5E12, about 9.6E12, about 9.7E12, about 9.8E12, or about 9.9E12 total vg/mL.

[0308] In some aspects, the concentration of the composition comprises about 9E11-9E13 total vg/mL. In some aspects, the concentration of the composition comprises about 9E11-9E13, about 10E11-8E13, about 1E12-7E13, about 2E12-6E13, about 3E12-5E13, about 4E12-4E13, about 5E12-3E13, about 6E12-2E13, about 7E12-1E13, or about 8E12-10E12 total vg/mL. In some aspects, the concentration of the composition comprises about 8E12-10E12, about 8.1E12-9.9E12, about 8.2E12-9.8E12, about 8.3E12-9.7E12, about 8.4E12-9.6E12, about 8.5E12-9.5E12, about 8.6E12-9.4E12, about 8.7E12-9.3E12, about 8.8E12-9.2E12, or about 8.9E12-9.1E12. In some aspects, the concentration of the composition comprises 9E12 total vg/mL.

[0309] In some aspects, the first and second rAAV vectors are capable of constituting a polypeptide messenger RNA encoding a full length human otoferlin protein in the subject. In some aspects, the first and second rAAV vectors are capable of reconstituting an active otoferlin gene (e.g., a full-length otoferlin gene) within a cell following intermolecular i) concatamerization, ii) recombination, iii) trans-splicing, iv) concatamerization and trans-splicing, or v) recombination and trans-splicing.

### Mammalian Cells

[0310] Also provided herein is a cell (e.g., a mammalian cell) that includes any of the nucleic acids, vectors (e.g., at least two different vectors described herein), or compositions described herein. Skilled practitioners will appreciate that the nucleic acids and vectors described herein can be introduced into any mammalian cell. Non-limiting examples of vectors and methods for introducing vectors into mammalian cells are described herein. In some aspects, the cell is a human cell, a mouse cell, a porcine cell, a rabbit cell, a dog cell, a cat cell, a rat cell, a sheep cell, a cat cell, a horse cell, or a non-human primate cell. In some aspects, the cell is a specialized cell of the cochlea. In some aspects, the cell is a cochlear inner hair cell or a cochlear outer hair cell. In some aspects, the cell is a cochlear inner hair cell. In some aspects, the cell is a cochlear inner hair cell.

[0311] In some aspects, the mammalian cell is in vitro. In some aspects, the mammalian cell is present in a mammal. In some aspects, the mammalian cell is a human cell. In some aspects, the mammalian cell is obtained from a subject. In some aspects, the mammalian cell is an autologous cell obtained from a subject and/or is cultured ex vivo.

### Methods of Use

Method of Introduction into Cochlea

[0312] Also provided herein is a method of introducing into a cochlea of a mammal (e.g., a human) the compositions described herein.

[0313] Also provided are methods of increasing expression of an active otoferlin protein (e.g., a full-length otoferlin protein) in an inner hair cell in a cochlea of a mammal (e.g., a human) that include introducing into the cochlea of the any of the compositions described herein.

[0314] Also provided are methods of treating hearing loss in a subject (e.g., a human) identified as having a defective otoferlin gene (e.g., an otoferlin gene having a mutation that results in a decrease in the expression and/or activity of an otoferlin protein encoded by the gene), wherein the methods include administering any of the compositions described herein into a cochlea of a subject.

[0315] Also provided are methods of treating non-syndromic sensorineural hearing loss in a subject (e.g., a human) identified as having a defective otoferlin gene (e.g., an otoferlin gene having a mutation that results in a decrease in the expression and/or activity of an otoferlin protein encoded by the gene), wherein the methods include administering any of the compositions described herein into a cochlea of a subject.

[0316] Also provided are methods of treating hearing loss in a subject (e.g., a human) identified as having biallelic otoferlin gene mutations, wherein the methods include administering any of the compositions described herein into a cochlea of a subject.

[0317] In some aspects, the methods described herein can further include administering a neurotrophic factor to a cochlea of a subject (e.g., at substantially the same time as or before, or after, any of the compositions described herein are administered to the subject). In some examples, the methods described herein can further include administering a cochlear implant to a subject (e.g., at substantially the same time as or before, or after, any of the compositions described herein are administered to the subject).

[0318] In some aspects of any of these methods, the mammal has been previously identified as having a defective otoferlin gene (e.g., an otoferlin gene having a mutation that results in a decrease in the expression and/or activity of an otoferlin protein encoded by the gene). In some aspects, these methods further include, prior to the introducing or administering step, determining that the subject has a defective otoferlin gene. In some aspects, these methods can further include detecting a mutation in an otoferlin gene in a subject. In some aspects, the methods can further include identifying or diagnosing a subject as having non-syndromic sensorineural hearing loss.

[0319] In some aspects, the subject identified as having biallelic otoferlin gene mutations has been previously identified as having biallelic otoferlin gene mutations. In some aspects, these methods further include, prior to the introducing or administering step, determining that the subject has biallelic otoferlin gene mutations. In some aspects, the biallelic otoferlin gene mutations can comprise any of the mutations of an otoferlin gene described herein. In some aspects, the biallelic otoferlin gene mutations cause localized synaptic transmission defects between hair cells and the auditory nerve in the subject.

[0320] In some aspects, the mammal or the subject has a clinical presentation of profound sensorineural hearing loss. In some aspects, the profound sensorineural hearing loss is bilateral profound sensorineural hearing loss. In some aspects, the subject identified as having a defective otoferlin gene has the clinical presentation of profound sensorineural hearing loss when afebrile.

[0321] In some aspects, the mammal or the subject has preserved distortion product otoacoustic emissions (DPOAEs). In some aspects, outer hair cells of the mammal or the subject function normally.

[0322] In some aspects, the methods can include administration of a single dose of the compositions described herein to the cochlea of the mammal or the subject.

[0323] In some aspects, these methods can include introducing or administering a first dose of the composition into the cochlea of the mammal or subject, assessing hearing function of the mammal or subject following the introducing or the administering of the first dose, and administering an additional dose of the composition into the cochlea of the mammal or subject found not to have a hearing function within a normal range (e.g., as determined using any test for hearing known in the art).

[0324] In some aspects, the composition is administered in a plurality of doses. In some aspects, the composition is administered in 2, 3, 4, 5, 6, 7, 8, 9, or 10 doses.

[0325] In some aspects, a single dose comprises about 0.01 mL-0.2 mL. In some aspects, a single dose comprises about 0.01-0.2, about 0.02-0.18, about 0.03-0.16, about 0.04-0.14, about 0.05-0.13, about 0.06-0.12, about 0.07-0.11, about 0.08-0.10 mL. In some aspects, a single dose comprises about 0.01, about 0.02, about 0.03, about 0.04, about 0.05, about 0.06, about 0.07, about 0.08, about 0.09, about 0.1, about 0.11, about 0.012, about 0.13, about 0.14, about 0.15, about 0.16, about 0.17, about 0.18, about 0.19, or about 0.2 mL. In some aspects, a single dose comprises about 0.09 mL.

[0326] In some aspects, the composition is administered in a single injection. In some aspects, the composition is administered in a plurality of injections. In some aspects, the composition is administered in 2, 3, 4, 5, 6, 7, 8, 9, or 10 injections.

[0327] In some aspects of any of the methods described herein, the composition can be formulated for intra-cochlear administration. In some aspects, the composition comprises one or more pharmaceutically acceptable carriers, diluents, or excipients. In some aspects, the composition further comprises one or more buffering agents and one or more surfactants. In some aspects, the buffering agents are selected from monopotassium phosphate, sodium phosphate dibasic, potassium chloride, sodium chloride, Tris HCl, Tris base, histidine, boric acid, citric acid, glycine, HEPES, and MOPS. In some aspects, the surfactant is selected from poloxamer 188, labrasol, tween, ethanol, pluronic F68, and polyethyelene glycol. In some aspects, the composition comprises monopotassium phosphate, sodium phosphate dibasic, potassium chloride, sodium chloride, and Poloxamer 188.

[0328] In some aspects, the composition comprises a) about 1.35-1.65 mM monopotassium phosphate; b) about 7.29-8.91 mM sodium phosphate dibasic; c) about 2.43-2.97 mM potassium chloride; d) about 154.8-189.2 mM sodium chloride; and e) about 0.0001%-0.01% Poloxamer 188.

[0329] In some aspects, the composition comprises a) about 1.35, about 1.375, about 1.4, about 1.425, about 1.45, about 1.475, about 1.5, about 1.525, about 1.55, about 1.575, about 1.6, about 1.625, or about 1.65 mM monopotassium phosphate; b) about 7.29, about 7.4, about 7.5 about 7.6, about 7.7 about 7.8, about 7.9, about 8.0, about 8.1, about 8.2, about 8.3, about 8.4, about 8.5, about 8.6, about 8.7, about 8.8, or about 8.91 mM sodium phosphate dibasic; c) about 2.43, about 2.5, about 2.55, about 2.6, about 2.65, about 2.7, about 2.75, about 2.8, about 2.85, about 2.9, about 2.95, or about 2.97 mM potassium chloride; d) about 154.8, about 160, about 165, about 170, about 175, about 180, about 185, or about 189.2 mM sodium chloride, and e) about 0.0001%, about 0.00025% about 0.0005%, about 0.00075%, about 0.001%, about 0.0025%, about 0.005%, about 0.0075%, or about 0.01% poloxamer 188.

[0330] In some aspects, the composition comprises: a) about 1.5 mM monopotassium phosphate; b) about 8.1 mM sodium phosphate dibasic; c) about 2.7 mM potassium chloride; d) about 172 mM sodium chloride; and e) about 0.001% Poloxamer 188.

[0331] In some aspects, the composition is formulated to comprise a synthetic perilymph solution. In some aspects, the synthetic perilymph solution comprises one or more pharmaceutically acceptable carriers, diluents, or excipients. In some aspects, the synthetic perilymph solution further comprises one or more buffering agents and one or more surfactants. In some aspects, the buffering agents are selected from monopotassium phosphate, sodium phosphate dibasic, potassium chloride, sodium chloride, Tris HCl, Tris base, histidine, boric acid, citric acid, glycine, HEPES, and MOPS. In some aspects, the surfactant is selected from poloxamer 188, labrasol, tween, ethanol, pluronic F68, and polyethyelene glycol. In some aspects, the synthetic perilymph solution comprises monopotassium phosphate, sodium phosphate dibasic, potassium chloride, sodium chloride, and Poloxamer 188.

[0332] In some aspects, the synthetic perilymph solution comprises a) about 1.35-1.65 mM monopotassium phosphate; b) about 7.29-8.91 mM sodium phosphate dibasic; c) about 2.43-2.97 mM potassium chloride; d) about 154.8-189.2 mM sodium chloride; and e) about 0.0001%-0.01% Poloxamer 188.

[0333] In some aspects, the synthetic perilymph solution comprises a) about 1.35, about 1.375, about 1.4, about 1.425, about 1.45, about 1.475, about 1.5, about 1.525, about 1.55, about 1.575, about 1.6, about 1.625, or about 1.65 mM monopotassium phosphate; b) about 7.29, about 7.4, about 7.5 about 7.6, about 7.7 about 7.8, about 7.9, about 8.0, about 8.1, about 8.2, about 8.3, about 8.4, about 8.5, about 8.6, about 8.7, about 8.8, or about 8.91 mM sodium phosphate dibasic; c) about 2.43, about 2.5, about 2.55, about 2.6, about 2.65, about 2.7, about 2.75, about 2.8, about 2.85, about 2.9, about 2.95, or about 2.97 mM potassium chloride; d) about 154.8, about 160, about 165, about 170, about 175, about 180, about 185, or about 189.2 mM sodium chloride, and e) about 0.0001%, about 0.00025% about 0.0005%, about 0.00075%, about 0.001%, about 0.0025%, about 0.005%, about 0.0075%, or about 0.01% poloxamer 188.

[0334] In some aspects, the synthetic perilymph solution comprises: a) about 1.5 mM monopotassium phosphate; b) about 8.1 mM sodium phosphate dibasic; c) about 2.7 mM potassium chloride; d) about 172 mM sodium chloride; and e) about 0.001% Poloxamer 188.

[0335] In some aspects, the compositions described herein can be administered via intra-cochlear administration or local administration. In some aspects, the compositions are administered through the use of a medical device (e.g., any of the exemplary medical devices described herein). In some aspects, the composition is pre-loaded in the device.

[0336] In some aspects, the device is a device as shown in FIGS. 2-5. In some aspects, the device is a microcatheter. In some aspects, the microcatheter is shaped such that it can enter the middle ear cavity via the external auditory canal and contact the end of the microcatheter with the round window membrane (RWM). In some aspects a distal end of the microcatheter comprises at least one microneedle with a diameter of between 10 and 1,000 microns. In some aspects, the at least one microneedle comprises a bent portion and an angled tip.

[0337] In some aspects, intra-cochlear administration can be performed using any of the methods described herein or known in the art. For example, a composition can be administered or introduced into the cochlea using the following surgical technique: first using visualization with a 0 degree, 2.5-mm rigid endoscope, the external auditory canal is cleared and a round knife is used to sharply delineate an approximately 5-mm tympanomeatal flap. The tympanomeatal flap is then elevated and the middle ear is entered posteriorly. The chorda tympani nerve is identified and divided, and a currette is used to remove the scutal bone, exposing the round window membrane. To enhance apical distribution of the administered or introduced composition, a surgical laser may be used to make a small 2-mm fenestration in the oval window to allow for perilymph displacement during trans-round window membrane infusion of the composition. The microinfusion device is then primed and brought into the surgical field. The device is maneuvered to the round window, and the tip is seated within the bony round window overhang to allow for penetration of the membrane by the microneedle(s). The footpedal is engaged to allow for a measured, steady infusion of the composition. The device is then withdrawn and the round window and stapes foot plate are sealed with a gelfoam patch.

[0338] In some aspects, the present disclosure describes a delivery approach that utilizes a minimally invasive, well-accepted surgical technique for accessing the middle ear and/or inner ear through the external auditory canal. The procedure includes opening one of the physical barriers between the middle and inner ear at the oval window, and subsequently using a device disclosed herein, e.g., as shown in FIGS. 2-5 (or microcatheter) to deliver a composition disclosed herein at a controlled flow rate and in a fixed volume, via the round window membrane.

[0339] In some aspects, surgical procedures for mammals (e.g., rodents (e.g., mice, rats, hamsters, or rabbits), primates (e.g., NHP (e.g., macaque, chimpanzees, monkeys, or apes) or humans) may include venting to increase AAV vector transduction rates along the length of the cochlea. In some aspects, absence of venting during surgery may result in lower AAV vector cochlear cell transduction rates when compared to AAV vector cochlear cell transduction rates following surgeries performed with venting. In some aspects, venting facilitates transduction rates of about 75-100% of IHCs throughout the cochlea. In some aspects, venting permits IHC transduction rates of about 50-70%, about 60-80%, about 70-90%, or about 80-100% at the base of the cochlea. In some aspects, venting permits IHC transduction rates of about 50-70%, about 60-80%, about 70-90%, or about 80-100% at the apex of the cochlea.

[0340] A delivery device described herein may be placed in a sterile field of an operating room and the end of a tubing may be removed from the sterile field and connected to a syringe that has been loaded with a composition disclosed herein (e.g., one or more AAV vectors) and mounted in the pump. After appropriate priming of the system in order to remove any air, a needle may then be passed through the middle ear under visualization (surgical microscope, endoscope, and/or distal tip camera). A needle (or microneedle) may be used to puncture the RWM. The needle may be inserted until a stopper contacts the RWM. The device may then be held in that position while a composition disclosed herein is delivered at a controlled flow rate to the inner ear, for a selected duration of time. In some aspects, the flow rate (or infusion rate) may include a rate of about 30 μL/min, or from about 25 μL/min to about 35 μL/min, or from about 20 μL/min to about 40 μL/min, or from about 20 μL/min to about 70 μL/min, or from about 20 μL/min to about 90 μL/min, or from about 20 μL/min to about 100 μL/min. In some aspects, the flow rate is about 20 μL/min, about 30 μL/min, about 40 μL/min, about 50 μL/min, about 60 μL/min, about 70 μL/min, about 80 μL/min, about 90 μL/min or about 100 μL/min. In some aspects, the selected duration of time (that is, the time during which a composition disclosed herein is flowing) may be about 3 minutes, or from about 2.5 minutes to about 3.5 minutes, or from about 2 minutes to about 4 minutes, or from about 1.5 minutes to about 4.5 minutes, or from about 1 minute to about 5 minutes. In some aspects, the total volume of a composition disclosed herein that flows to the inner ear may be about 0.09 mL, or from about 0.08 mL to about 0.10 mL, or from about 0.07 mL to about 0.11 mL.

[0341] In some aspects, a single dose comprises about 0.01 mL-0.2 mL. In some aspects, a single dose comprises about 0.01-0.2, about 0.02-0.18, about 0.03-0.16, about 0.04-0.14, about 0.05-0.13, about 0.06-0.12, about 0.07-0.11, about 0.08-0.10 mL. In some aspects, a single dose comprises about 0.01, about 0.02, about 0.03, about 0.04, about 0.05, about 0.06, about 0.07, about 0.08, about 0.09, about 0.1, about 0.11, about 0.012, about 0.13, about 0.14, about 0.15, about 0.16, about 0.17, about 0.18, about 0.19, or about 0.2 mL. In some aspects, a single dose comprises about 0.09 mL.

[0342] In some aspects, the total volume of a composition disclosed herein equates to from about 40% to about 50% of the volume of the inner ear.

[0343] Once the delivery has been completed, the device may be removed. In some embodiments, a device described herein, may be configured as a single-use disposable product. In other aspects, a device described herein may be configured as a multi-use, sterilizable product, for example, with a replaceable and/or sterilizable needle sub-assembly. Single use devices may be appropriately discarded (for example, in a biohazard sharps container) after administration is complete.

[0344] In some embodiments, a composition disclosed herein comprises one or a plurality of AAV vectors. In some aspects, when more than one AAV vector is included in the composition, the AAV vectors are each different. In some aspects, an AAV vector comprises an OTOF coding region, e.g., as described herein. In some aspects, a composition comprises an rAAV particle comprising an AAV vector described herein. In some aspects, the r AAV particle is encapsidated by an Anc80 capsid. In some aspect, the Anc80 capsid comprises a polypeptide of SEQ ID NO: 109.

### Subjects

[0345] In some aspects of any of the methods described herein, the subject or mammal is a rodent, a non-human primate, or a human. In some aspects of any of the methods described herein, the subject or mammal is an adult, a teenager, a juvenile, a child, a toddler, an infant, or a newborn. In some aspects of any of the methods described herein, the subject or mammal is 1-5, 1-10, 1-20, 1-30, 1-40, 1-50, 1-60, 1-70, 1-80, 1-90, 1-100, 1-110, 2-5, 2-10, 10-20, 20-30, 30-40, 40-50, 50-60, 60-70, 70-80, 80-90, 90-100, 100-110, 10-30, 10-40, 10-50, 10-60, 10-70, 10-80, 10-90, 10-100, 10-110, 20-40, 20-50, 20-60, 20-70, 20-80, 20-90, 20-100, 20-110, 30-50, 30-60, 30-70, 30-80, 30-90, 30-100, 40-60, 40-70, 40-80, 40-90, 40-100, 50-70, 50-80, 50-90, 50-100, 60-80, 60-90, 60-100, 70-90, 70-100, 70-110, 80-100, 80-110, or 90-110 years of age. In some aspects of any of the methods described herein, the subject or mammal is 1, 2, 3, 4, 5, 6, 7, 8, 9, 10, or 11 months of age. In some aspects, the subject is between 2 and 17 years of age.

[0346] In some aspects of any of the methods described herein, the methods result in improvement in hearing (e.g., any of the metrics for determining improvement in hearing described herein) in a subject in need thereof for at least 10 days, at least 15 days, at least 20 days, at least 25 days, at least 30 days, at least 35 days, at least 40 days, at least 45 days, at least 50 days, at least 55 days, at least 60 days, at least 65 days, at least 70 days, at least 75 days, at least 80 days, at least 85 days, at least 100 days, at least 105 days, at least 110 days, at least 115 days, at least 120 days, at least 5 months, at least 6 months, at least 7 months, at least 8 months, at least 9 months, at least 10 months, at least 11 months, or at least 12 months.

[0347] In some aspects, the subject or mammal has or is at risk of developing non-syndromic sensorineural hearing loss. In some aspects, the subject or mammal has been identified as having a defective otoferlin gene. In some aspects, the subject or mammal has been previously identified as having a mutation in an otoferlin gene. In some aspects, the subject or mammal has any of the mutations in an otoferlin gene that are described herein or are known in the art to be associated with non-syndromic sensorineural hearing loss.

[0348] In some aspects, the subject or mammal has been identified as being a carrier of a mutation in an otoferlin gene (e.g., via genetic testing). In some aspects, the subject or human has been identified as having a mutation in an otoferlin gene and has been diagnosed with non-syndromic sensorineural hearing loss. In some aspects, the subject or human has been identified as having non-syndromic sensorineural hearing loss.

[0349] In some aspects, successful treatment of non-syndromic sensorineural hearing loss can be determined in a subject using any of the conventional functional hearing tests known in the art. Non-limiting examples of functional hearing tests are various types of audiometric assays (e.g., pure-tone testing, speech testing, test of the middle ear, auditory brainstem response, and otoacoustic emissions). In some aspects, the administration of the composition improves the subject's or mammal's auditory brainstem response (ABR) threshold response, age-appropriate behavioral audiometry, tympanometry, and/or word/sentence recognition testing.

### Increasing Expression of Active Otoferlin

[0350] Also provided herein are methods of increasing expression of an active otoferlin protein (e.g., a full-length otoferlin protein) in a mammalian cell that include introducing any of the compositions described herein into a mammalian cell. In some aspects, a mammalian cell is a cochlear cell. In some aspects, the mammalian cell is a inner ear hair cell. In some aspects, a mammalian cell is a human cell (e.g., a human cochlear inner hair cell). In some aspects, a mammalian cell is in vitro. In some aspects, a mammalian cell is in a mammal. In some aspects, a mammalian cell is originally obtained from a mammal and/or is cultured ex vivo. In some aspects, a mammalian cell has previously been determined to have a defective otoferlin gene.

[0351] Methods for introducing any of the compositions described herein into a mammalian cell are known in the art (e.g., the use of a viral vector, e.g., any of the viral vectors described herein).

[0352] In some aspects, an increase in expression of an active otoferlin protein (e.g., a full-length otoferlin protein) as described herein is, e.g., as compared to a control or to the level of expression of an active otoferlin protein (e.g., a full-length otoferlin protein) prior to the introduction of the vector(s).

### Methods of Detecting Otoferlin

[0353] Methods of detecting expression and/or activity of otoferlin are known in the art. In some aspects, the level of expression of an otoferlin protein can be detected directly (e.g., detecting otoferlin protein or detecting otoferlin mRNA). Non-limiting examples of techniques that can be used to detect expression and/or activity of otoferlin directly include: real-time PCR, Western blotting, immunoprecipitation, immunohistochemistry, or immunofluorescence. In some aspects, expression of an otoferlin protein can be detected indirectly (e.g., through functional hearing tests).

### Dosing and Volume of Administration

[0354] In some aspects, a composition disclosed herein is administered as a single dose or as a plurality of doses. In some aspects, the composition is administered in a single dose. In some aspects, the composition is administered in a plurality of doses. In some aspects, the composition is administered in 2, 3, 4, 5, 6, 7, 8, 9, or 10 doses.

[0355] In some aspects, the composition is administered in a single injection. In some aspects, the composition is administered in a plurality of injections. In some aspects, the composition is administered in 2, 3, 4, 5, 6, 7, 8, 9, or 10 injections.

[0356] In some aspects, a composition disclosed herein (e.g., a composition comprising one or a plurality of AAV vectors disclosed herein) is administered at a volume of about 0.01 mL, about 0.02 mL, about 0.03 mL, about 0.04 mL, about 0.05 mL, about 0.06 mL, about 0.07 mL, about 0.08 mL, about 0.09 mL, about 1.00 mL, about 1.10 mL, about 1.20 mL, about 1.30 mL, about 1.40 mL, about 1.50 mL, about 1.60 mL, about 1.70 mL, about 1.80 mL, about 1.90 mL, or about 2.00 mL. In some aspects, a composition disclosed herein is administered at a volume of about 0.01 mL. In some aspects, a composition disclosed herein is administered at a volume of about 0.02 mL. In some aspects, a composition disclosed herein is administered at a volume of about 0.03 mL. In some aspects, a composition disclosed herein is administered at a volume of about 0.04 mL. In some aspects, a composition disclosed herein is administered at a volume of about 0.05 mL. In some aspects, a composition disclosed herein is administered at a volume of about 0.06 mL. In some aspects, a composition disclosed herein is administered at a volume of about 0.07 mL. In some aspects, a composition disclosed herein is administered at a volume of about 0.08 mL. In some aspects, a composition disclosed herein is administered at a volume of about 0.09 mL. In some aspects, a composition disclosed herein is administered at a volume of about 1.00 mL. In some aspects, a composition disclosed herein is administered at a volume of about 1.10 mL. In some aspects, a composition disclosed herein is administered at a volume of about 1.20 mL. In some aspects, a composition disclosed herein is administered at a volume of about 1.30 mL. In some aspects, a composition disclosed herein is administered at a volume of about 1.40 mL. In some aspects, a composition disclosed herein is administered at a volume of about 1.50 mL. In some aspects, a composition disclosed herein is administered at a volume of about 1.60 mL. In some aspects, a composition disclosed herein is administered at a volume of about 1.70 mL. In some aspects, a composition disclosed herein is administered at a volume of about 1.80 mL. In some aspects, a composition disclosed herein is administered at a volume of about 1.90 mL. In some aspects, a composition disclosed herein is administered at a volume of about 2.00 mL.

[0357] In some aspects, a composition disclosed herein (e.g., a composition comprising one or a plurality of AAV vectors disclosed herein) is administered at a volume of about 0.01 to 2.00 mL, about 0.02 to 1.90 mL, about 0.03 to 1.8 mL, about 0.04 to 1.70 mL, about 0.05 to 1.60 mL, about 0.06 to 1.50 mL, about 0.06 to 1.40 mL, about 0.07 to 1.30 mL, about 0.08 to 1.20 mL, or about 0.09 to 1.10 mL. In some aspects a composition disclosed herein (e.g., a composition comprising one or a plurality of AAV vectors disclosed herein) is administered at a volume of about 0.01 to 2.00 mL, about 0.02 to 2.00 mL, about 0.03 to 2.00 mL, about 0.04 to 2.00 mL, about 0.05 to 2.00 mL, about 0.06 to 2.00 mL, about 0.07 to 2.00 mL, about 0.08 to 2.00 mL, about 0.09 to 2.00 mL, about 0.01 to 1.90 mL, about 0.01 to 1.80 mL, about 0.01 to 1.70 mL, about 0.01 to 1.60 mL, about 0.01 to 1.50 mL, about 0.01 to 1.40 mL, about 0.01 to 1.30 mL, about 0.01 to 1.20 mL, about 0.01 to 1.10 mL, about 0.01 to 1.00 mL, about 0.01 to 0.09 mL.

[0358] In some aspects, a single dose comprises about 0.01 mL-0.2 mL. In some aspects, a single dose comprises about 0.01-0.2, about 0.02-0.18, about 0.03-0.16, about 0.04-0.14, about 0.05-0.13, about 0.06-0.12, about 0.07-0.11, or about 0.08-0.10 mL. In some aspects, a single dose comprises about 0.01, about 0.02, about 0.03, about 0.04, about 0.05, about 0.06, about 0.07, about 0.08, about 0.09, about 0.1, about 0.11, about 0.012, about 0.13, about 0.14, about 0.15, about 0.16, about 0.17, about 0.18, about 0.19, or about 0.2 mL. In some aspects, a single dose comprises about 0.09 mL.

### Formulations

[0359] Also provided herein are formulations comprising any of the compositions herein.

[0360] In some aspects, compositions of the disclosure comprise a) a first recombinant adeno-associated viral (rAAV) vector genome (vg) comprising a first expression cassette comprising a promoter operably linked to nucleic acid sequence comprising a 5′ portion of an otoferlin gene, wherein the expression cassette is flanked by inverted terminal repeats (ITRs); and b) a second rAAV vector genome comprising a second expression cassette comprising a nucleic acid sequence comprising a 3′ portion of an otoferlin gene, wherein the expression cassette is flanked by ITRs; wherein the composition comprises about 4.1E10-8.1E12 total vg.

[0361] In some aspects, compositions of the disclosure comprise a) a first recombinant adeno-associated viral (rAAV) vector genome (vg) comprising a first expression cassette comprising a promoter operably linked to nucleic acid sequence comprising a 5′ portion of an otoferlin gene, wherein the expression cassette is flanked by inverted terminal repeats (ITRs); and b) a second rAAV vector genome comprising a second expression cassette comprising a nucleic acid sequence comprising a 3′ portion of an otoferlin gene, wherein the expression cassette is flanked by ITRs; wherein the composition comprises about 4.1E10-4.1E12 total vg or about 8.1E10-8.1E12 total vg.

[0362] In some aspects, compositions of the disclosure comprise (a) a first rAAV vector genome comprising a first expression cassette comprising a promoter, a first coding sequence that encodes an N-terminal portion of an otoferlin protein positioned 3′ of the promoter, and a splicing donor signal sequence positioned at the 3′ end of the first coding sequence; and (b) a second rAAV vector genome comprising a second expression cassette comprising a splicing acceptor signal sequence, a second coding sequence that encodes a C-terminal portion of an otoferlin protein positioned at the 3′ end of the splicing acceptor signal sequence, and a polyadenylation sequence at 3′ end of the second coding sequence, wherein the composition is formulated for intra-cochlear administration.

[0363] In some aspects, compositions of the disclosure comprise a) a first recombinant adeno-associated viral (rAAV) vector genome (vg) comprising a first expression cassette comprising a promoter operably linked to nucleic acid sequence comprising a 5′ portion of an otoferlin gene, wherein the expression cassette is flanked by inverted terminal repeats (ITRs); and b) a second rAAV vector genome comprising a second expression cassette comprising a nucleic acid sequence comprising a 3′ portion of an otoferlin gene, wherein the expression cassette is flanked by ITRs; wherein the composition is formulated for intra-cochlear administration. In some aspects, the composition comprises the first rAAV vector genome and the second rAAV vector genome in about a 1:1 ratio.

[0364] In some aspects, the composition comprises about 4.1E10-8.1E12 total vg. In some aspects, the composition comprises about 4.1E10-4.1E12 total vg or about 8.1E10-8.1E12 total vg.

[0365] In some aspects, the composition comprises about 4.1E10-4.1E12, about 5.1E10-3.1E12, about 6.1E10-2.1E12, about 7.1E10-1.1E12, about 8.1E10-10.1E11, about 9.1E10-9.1E11, about 10.1E11-8.1E11, about 1.1E11-7.1E11, about 2.1E11-6.1E11, or about 3.1E11-5.1E11 total vg. In some aspects, the composition comprises about 3.1E11-5.1E11, about 3.2E11-5.0E11, about 3.3E11-4.9E11, about 3.4E11-4.8E11, about 3.5E11-4.7E11, about 3.6E11-4.6E11, about 3.7E11-4.5E11, about 3.8E11-4.4E11, about 3.9E11-4.3E11, or about 4.0E11-4.2E11 total vg. In some aspects, the composition comprises about 4.1E11 total vg.

[0366] In some aspects, the composition comprises about 4.1E10-8.1E12 total vg/cochlea. In some aspects, the composition comprises about 4.1E10-4.1E12 total vg/cochlea or about 8.1E10-8.1E12 total vg/cochlea.

[0367] In some aspects, the composition comprises about 4.1E10-4.1E12, about 5.1E10-3.1E12, about 6.1E10-2.1E12, about 7.1E10-1.1E12, about 8.1E10-10.1E11, about 9.1E10-9.1E11, about 10.1E11-8.1E11, about 1.1E11-7.1E11, about 2.1E11-6.1E11, or about 3.1E11-5.1E11 total vg/cochlea. In some aspects, the composition comprises about 3.1E11-5.1E11, about 3.2E11-5.0E11, about 3.3E11-4.9E11, about 3.4E11-4.8E11, about 3.5E11-4.7E11, about 3.6E11-4.6E11, about 3.7E11-4.5E11, about 3.8E11-4.4E11, about 3.9E11-4.3E11, or about 4.0E11-4.2E11 total vg/cochlea. In some aspects, the composition comprises about 4.1E11 total vg/cochlea.

[0368] In some aspects, the composition comprises about 3.0E11, about 3.1E11, about 3.2E11, about 3.3E11, about 3.4E11, about 3.5E11, about 3.6E11, about 3.7E11, about 3.8E11, about 3.9E11, about 4.0E11, about 4.1E11, about 4.2E11, about 4.3E11, about 4.4E11, about 4.5E11, about 4.6E11, about 4.7E11, about 4.8E11, about 4.9E11, about 5.0E11, about 5.1E11, about 5.2E11, about 5.3E11, about 5.4E11, about 5.5E11, about 5.6E11, about 5.7E11, about 5.8E11, about 5.9E11, about 6.0E11, about 6.1E11, about 6.2E11, about 6.3E11, about 6.4E11, about 6.5E11, about 6.6E11, about 6.7E11, about 6.8E11, about 6.9E11, about 7.0E11, about 7.1E11, about 7.2E11, about 7.3E11, about 7.4E11, about 7.5E11, about 7.6E11, about 7.7E11, about 7.8E11, about 7.9E11, about 8.0E11, about 8.1E11, about 8.2E11, about 8.3E11, about 8.4E11, about 8.5E11, about 8.6E11, about 8.7E11, about 8.8E11, or about 8.9E11 total vg.

[0369] In some aspects, the composition comprises about 3.0E11, about 3.1E11, about 3.2E11, about 3.3E11, about 3.4E11, about 3.5E11, about 3.6E11, about 3.7E11, about 3.8E11, about 3.9E11, about 4.0E11, about 4.1E11, about 4.2E11, about 4.3E11, about 4.4E11, about 4.5E11, about 4.6E11, about 4.7E11, about 4.8E11, about 4.9E11, about 5.0E11, about 5.1E11, about 5.2E11, about 5.3E11, about 5.4E11, about 5.5E11, about 5.6E11, about 5.7E11, about 5.8E11, about 5.9E11, about 6.0E11, about 6.1E11, about 6.2E11, about 6.3E11, about 6.4E11, about 6.5E11, about 6.6E11, about 6.7E11, about 6.8E11, about 6.9E11, about 7.0E11, about 7.1E11, about 7.2E11, about 7.3E11, about 7.4E11, about 7.5E11, about 7.6E11, about 7.7E11, about 7.8E11, about 7.9E11, about 8.0E11, about 8.1E11, about 8.2E11, about 8.3E11, about 8.4E11, about 8.5E11, about 8.6E11, about 8.7E11, about 8.8E11, or about 8.9E11 total vg/cochlea.

[0370] In some aspects, the composition comprises about 8.1E10-8.1E12, about 9.1E10-7.1E12, about 10.1E10-6.1E12, about 1.1E11-5.1E12, about 2.1E11-4.1E12, about 3.1E11-3.1E12, about 4.1E11-2.1E12, about 5.1E11-1.1E12, about 6.1E11-10.1E11, or about 7.1E11-9.1E11 total vg. In some aspects, the composition comprises about 7.1E11-9.1E11, about 7.2E11-9.0E11, about 7.3E11-8.9E11, about 7.4E11-8.8E11, about 7.5E11-8.7E11, about 7.6E11-8.6E11, about 7.7E11-8.5E11, about 7.8E11-8.4E11, about 7.9E11-8.3E11, or about 8.0E11-8.2E11 total vg. In some aspects, the composition comprises about 8.1E11 total vg.

[0371] In some aspects, the composition comprises about 8.1E10-8.1E12, about 9.1E10-7.1E12, about 10.1E10-6.1E12, about 1.1E11-5.1E12, about 2.1E11-4.1E12, about 3.1E11-3.1E12, about 4.1E11-2.1E12, about 5.1E11-1.1E12, about 6.1E11-10.1E11, or about 7.1E11-9.1E11 total vg/cochlea. In some aspects, the composition comprises about 7.1E11-9.1E11, about 7.2E11-9.0E11, about 7.3E11-8.9E11, about 7.4E11-8.8E11, about 7.5E11-8.7E11, about 7.6E11-8.6E11, about 7.7E11-8.5E11, about 7.8E11-8.4E11, about 7.9E11-8.3E11, or about 8.0E11-8.2E11 total vg/cochlea. In some aspects, the composition comprises about 8.1E11 total vg/cochlea.

[0372] In some aspects, the concentration of the composition comprises about 4.5E11-9E13 total vg/mL. In some aspects, the concentration of the composition comprises about 4.5E11-4.5E13 total vg/mL or about 9E11-9E13 total vg/mL. In some aspects, the concentration of the composition comprises about 4.5E11-4.5E13 total vg/mL. In some aspects, the concentration of the composition comprises about 5.5E11-3.5E13, about 6.5E11-2.5E13, about 7.5E11-1.5E13, about 8.5E11-10.5E12, about 9.5E11-9.5E12, about 10.5E11-8.5E12, about 1.5E12-7.5E12, about 2.5E12-6.5E12, or about 3.5E12-5.5E12 total vg/mL. In some aspects, the concentration of the composition comprises about 3.5E12-5.5E12, about 3.6E12-5.4E12, about 3.7E12-5.3E12, about 3.8E12-5.2E12, about 3.9E12-5.1E12, about 4.0E12-5.0E12, about 4.1E12-4.9E12, about 4.2E12-4.8E12, about 4.3E12-4.7E12, or about 4.4E12-4.6E12 total vg/mL. In some aspects, the concentration of the composition comprises about 4.5E12 total vg/mL.

[0373] In some aspects, the concentration of the composition comprises about 3.5E12, about 3.6E12, about 3.7E12, about 3.8E12, about 3.9E12, about 4.0E12, about 4.1E12, about 4.2E12, about 4.3E12, about 4.4E12, about 4.5E12, about 4.6E12, about 4.7E12, about 4.8E12, about 4.9E12, about 5.0E12, about 5.1E12, about 5.2E12, about 5.3E12, about 5.4E12, about 5.5E12, about 5.6E12, about 5.7E12, about 5.8E12, about 5.9E12, about 6.0E12, about 6.1E12, about 6.2E12, about 6.3E12, about 6.4E12, about 6.5E12, about 6.6E12, about 6.7E12, about 6.8E12, about 6.9E12, about 7.0E12, about 7.1E12, about 7.2E12, about 7.3E12, about 7.4E12, about 7.5E12, about 7.6E12, about 7.7E12, about 7.8E12, about 7.9E12, about 8.0E12, about 8.1E12, about 8.2E12, about 8.3E12, about 8.4E12, about 8.5E12, about 8.6E12, about 8.7E12, about 8.8E12, about 8.9E12, about 9.0E12, about 9.1E12, about 9.2E12, about 9.3E12, about 9.4E12, about 9.5E12, about 9.6E12, about 9.7E12, about 9.8E12, or about 9.9E12 total vg/mL.

[0374] In some aspects, the concentration of the composition comprises about 9E11-9E13 total vg/mL. In some aspects, the concentration of the composition comprises about 9E11-9E13, about 10E11-8E13, about 1E12-7E13, about 2E12-6E13, about 3E12-5E13, about 4E12-4E13, about 5E12-3E13, about 6E12-2E13, about 7E12-1E13, or about 8E12-10E12 total vg/mL. In some aspects, the concentration of the composition comprises about 8E12-10E12, about 8.1E12-9.9E12, about 8.2E12-9.8E12, about 8.3E12-9.7E12, about 8.4E12-9.6E12, about 8.5E12-9.5E12, about 8.6E12-9.4E12, about 8.7E12-9.3E12, about 8.8E12-9.2E12, or about 8.9E12-9.1E12. In some aspects, the concentration of the composition comprises 9E12 total vg/mL.

[0375] Pharmaceutical compositions of the present disclosure may comprise the rAAV vectors, as described herein, in combination with one or more pharmaceutically or physiologically acceptable carriers, diluents, or excipients.

[0376] In some aspects, the composition may comprise buffering agents such as neutral buffered saline, phosphate buffered saline, monopotassium phosphate, sodium phosphate dibasic, potassium chloride, sodium chloride, Tris HCl, Tris base, histidine, boric acid, citric acid, glycine, HEPES, and MOPS; carbohydrates such as glucose, mannose, sucrose, or dextrans; mannitol; proteins; polypeptides or amino acids such as glycine; antioxidants; chelating agents such as EDTA or glutathione; adjuvants (e.g., aluminum hydroxide); surfactants such as poloxamer 188, labrasol, tween, ethanol, pluronic F68, and polyethyelene glycol; and preservatives.

[0377] In some aspects, the composition comprises one or more buffering agents and one or more surfactants. In some aspects, the buffering agents are selected from monopotassium phosphate, sodium phosphate dibasic, potassium chloride, sodium chloride, Tris HCl, Tris base, histidine, boric acid, citric acid, glycine, HEPES, and MOPS. In some aspects, the surfactant is selected from poloxamer 188, labrasol, tween, ethanol, pluronic F68, and polyethyelene glycol.

[0378] In some aspects, the composition comprises monopotassium phosphate, sodium phosphate dibasic, potassium chloride, sodium chloride, and Poloxamer 188. In some aspects, the composition comprises a) about 1.35-1.65 mM monopotassium phosphate; b) about 7.29-8.91 mM sodium phosphate dibasic; c) about 2.43-2.97 mM potassium chloride; d) about 154.8-189.2 mM sodium chloride; and e) about 0.0001%-0.01% Poloxamer 188.

[0379] In some aspects, the composition comprises a) about 1.35, about 1.375, about 1.4, about 1.425, about 1.45, about 1.475, about 1.5, about 1.525, about 1.55, about 1.575, about 1.6, about 1.625, or about 1.65 mM monopotassium phosphate; b) about 7.29, about 7.4, about 7.5 about 7.6, about 7.7 about 7.8, about 7.9, about 8.0, about 8.1, about 8.2, about 8.3, about 8.4, about 8.5, about 8.6, about 8.7, about 8.8, or about 8.91 mM sodium phosphate dibasic; c) about 2.43, about 2.5, about 2.55, about 2.6, about 2.65, about 2.7, about 2.75, about 2.8, about 2.85, about 2.9, about 2.95, or about 2.97 mM potassium chloride; d) about 154.8, about 160, about 165, about 170, about 175, about 180, about 185, or about 189.2 mM sodium chloride, and e) about 0.0001%, about 0.00025% about 0.0005%, about 0.00075%, about 0.001%, about 0.0025%, about 0.005%, about 0.0075%, or about 0.01% poloxamer 188.

[0380] In some aspects, the composition comprises a) about 1.5 mM monopotassium phosphate; b) about 8.1 mM sodium phosphate dibasic; c) about 2.7 mM potassium chloride; d) about 172 mM sodium chloride; and e) about 0.001% Poloxamer 188.

[0381] In some aspects, the composition is formulated as a sterile suspension. In some aspects, the sterile suspension comprises a pharmaceutically acceptable carrier. In some aspects, the suspension comprises sterile water. In some aspects, the composition comprises a volume of about 0.01 mL to 0.2 mL. In some aspects, the composition comprises a volume of about 0.01-0.2, about 0.02-0.18, about 0.03-0.16, about 0.04-0.14, about 0.05-0.13, about 0.06-0.12, about 0.07-0.11, about 0.08-0.10 mL. In some aspects, a single dose comprises about 0.01, about 0.02, about 0.03, about 0.04, about 0.05, about 0.06, about 0.07, about 0.08, about 0.09, about 0.1, about 0.11, about 0.012, about 0.13, about 0.14, about 0.15, about 0.16, about 0.17, about 0.18, about 0.19, or about 0.2 mL. In some aspects, the composition comprises a volume of about 0.09 mL.

[0382] In some aspects, the compositions of the present disclosure are formulated for intra-cochlear administration. In some aspects, the compositions of the present disclosure are formulated for intravenous administration.

[0383] In some aspects, the compositions are formulated to comprise a synthetic perilymph solution. In some aspects, the synthetic perilymph solution comprises one or more buffering agents and one or more surfactants. In some aspects, the buffering agents are selected from monopotassium phosphate, sodium phosphate dibasic, potassium chloride, sodium chloride, Tris HCl, Tris base, histidine, boric acid, citric acid, glycine, HEPES, and MOPS. In some aspects, the surfactant is selected from poloxamer 188, labrasol, tween, ethanol, pluronic F68, and polyethyelene glycol.

[0384] In some aspects, the synthetic perilymph solution comprises monopotassium phosphate, sodium phosphate dibasic, potassium chloride, sodium chloride, and Poloxamer 188. In some aspects, the synthetic perilymph solution comprises a) about 1.35-1.65 mM monopotassium phosphate; b) about 7.29-8.91 mM sodium phosphate dibasic; c) about 2.43-2.97 mM potassium chloride; d) about 154.8-189.2 mM sodium chloride; and e) about 0.0001%-0.01% Poloxamer 188.

[0385] In some aspects, the synthetic perilymph solution comprises a) about 1.35, about 1.375, about 1.4, about 1.425, about 1.45, about 1.475, about 1.5, about 1.525, about 1.55, about 1.575, about 1.6, about 1.625, or about 1.65 mM monopotassium phosphate; b) about 7.29, about 7.4, about 7.5 about 7.6, about 7.7 about 7.8, about 7.9, about 8.0, about 8.1, about 8.2, about 8.3, about 8.4, about 8.5, about 8.6, about 8.7, about 8.8, or about 8.91 mM sodium phosphate dibasic; c) about 2.43, about 2.5, about 2.55, about 2.6, about 2.65, about 2.7, about 2.75, about 2.8, about 2.85, about 2.9, about 2.95, or about 2.97 mM potassium chloride; d) about 154.8, about 160, about 165, about 170, about 175, about 180, about 185, or about 189.2 mM sodium chloride, and e) about 0.0001%, about 0.00025% about 0.0005%, about 0.00075%, about 0.001%, about 0.0025%, about 0.005%, about 0.0075%, or about 0.01% poloxamer 188.

[0386] In some aspects, the synthetic perilymph solution comprises a) about 1.5 mM monopotassium phosphate; b) about 8.1 mM sodium phosphate dibasic; c) about 2.7 mM potassium chloride; d) about 172 mM sodium chloride; and e) about 0.001% Poloxamer 188.

[0387] In some aspects, the compositions described herein can further include one or more agents that promote the entry of a nucleic acid or any of the vectors described herein into a mammalian cell (e.g., a liposome or cationic lipid). In some aspects, any of the vectors described herein can be formulated using natural and/or synthetic polymers. Non-limiting examples of polymers that may be included in any of the compositions described herein can include, but are not limited to, DYNAMIC POLYCONJUGATE® (Arrowhead Research Corp., Pasadena, Calif.), formulations from Mirus Bio (Madison, Wis.) and Roche Madison (Madison, Wis.), PhaseRX polymer formulations such as, without limitation, SMARTT POLYMER TECHNOLOGY® (PhaseRX, Seattle, Wash.), DMRI/DOPE, poloxamer, VAXFECTIN® adjuvant from Vical (San Diego, Calif.), chitosan, cyclodextrin from Calando Pharmaceuticals (Pasadena, Calif.), dendrimers and poly(lactic-co-glycolic acid) (PLGA) polymers, RONDEL™ (RNAi/Oligonucleotide Nanoparticle Delivery) polymers (Arrowhead Research Corporation, Pasadena, Calif.), and pH responsive co-block polymers, such as, but not limited to, those produced by PhaseRX (Seattle, Wash.). Many of these polymers have demonstrated efficacy in delivering oligonucleotides in vivo into a mammalian cell (see, e.g., deFougerolles, Human Gene Ther. 19:125-132, 2008; Rozema et al., Proc. Natl. Acad. Sci. U.S.A. 104:12982-12887, 2007; Rozema et al., Proc. Natl. Acad. Sci. U.S.A. 104:12982-12887, 2007; Hu-Lieskovan et al., Cancer Res. 65:8984-8982, 2005; Heidel et al., Proc. Natl. Acad. Sci. U.S.A. 104:5715-5721, 2007). Any of the compositions described herein can be, e.g., a pharmaceutical composition.

[0388] In some aspects, the composition includes a pharmaceutically acceptable carrier (e.g., phosphate buffered saline, saline, or bacteriostatic water). Upon formulation, solutions will be administered in a manner compatible with the dosage formulation and in such amount as is therapeutically effective. The formulations are easily administered in a variety of dosage forms such as injectable solutions, injectable gels, drug-release capsules, and the like.

[0389] The compositions provided herein can be, e.g., formulated to be compatible with their intended route of administration. A non-limiting example of an intended route of administration is local administration (e.g., intra-cochlear administration).

[0390] Also provided are kits including any of the compositions described herein. In some aspects, a kit can include a solid composition (e.g., a lyophilized composition including the at least two different vectors described herein) and a liquid for solubilizing the lyophilized composition. In some aspects, a kit can include a pre-loaded syringe including any of the compositions described herein.

[0391] In some aspects, a kit can include the composition is pre-loaded in a device. In some aspects, the device is a microcatheter. In some aspects, the microcatheter is shaped such that it can enter the middle ear cavity via the external auditory canal and contact the end of the microcatheter with the RWM. In some aspects, a distal end of the microcatheter is comprised of at least one microneedle with diameter of between 10 and 1,000 microns.

[0392] In some aspects, a kit can include a device. In some aspects, the device is a device provided herein. In some aspects, the device is a device described in any one of FIGS. 2-5. In some aspects, the device comprises a needle comprising a bent portion and an angled tip.

[0393] In some aspects, a kit includes a vial comprising any of the compositions described herein (e.g., formulated as an aqueous composition, e.g., an aqueous pharmaceutical composition). In some aspects, the vial is a single use vial or multi-use vial.

[0394] In some aspects, the vial is a single-use vial. In some aspects, the single-use vial comprises the composition at a concentration appropriate for intra-cochlear administration (target concentration). In some aspects, the target concentration is about 4.5E11-9E13 vg/mL. In some aspects, the target concentration is about 1E13 total vg/mL.

[0395] In some aspects, the kit includes a second vial comprising a diluent. In some aspects, the second vial is a single-use vial or a multi-use vial. In some aspects, the diluent comprises the one or more pharmaceutically or physiologically acceptable carriers, diluents, or excipients of the composition. In some aspects, the concentrations of the one or more pharmaceutically or physiologically acceptable carriers, diluents, or excipients of the composition are equivalent to the concentrations of the one or more pharmaceutically or physiologically acceptable carriers, diluents, or excipients comprised in the composition. In some aspects, the diluent comprises a) about 1.5 mM monopotassium phosphate; b) about 8.1 mM sodium phosphate dibasic; c) about 2.7 mM potassium chloride; d) about 172 mM sodium chloride; and e) about 0.001% Poloxamer 188. In some aspects, the diluent is utilized to prepare the concentration of the composition to be administered to a subject in need thereof.

[0396] In some aspects, a kit can include instructions for performing any of the methods described herein. The pharmaceutical forms suitable for injectable use include sterile aqueous solutions or dispersions and sterile powders for the extemporaneous preparation of sterile injectable solutions or dispersions. Dispersions may also be prepared in glycerol, liquid polyethylene glycols, and mixtures thereof and in oils. Under ordinary conditions of storage and use, these preparations contain a preservative to prevent the growth of microorganisms. In many cases the form is sterile and fluid to the extent that easy syringability exists. It must be stable under the conditions of manufacture and storage and must be preserved against the contaminating action of microorganisms, such as bacteria and fungi. The carrier can be a solvent or dispersion medium containing, for example, water, ethanol, polyol (e.g., glycerol, propylene glycol, and liquid polyethylene glycol, and the like), suitable mixtures thereof, and/or vegetable oils. Proper fluidity may be maintained, for example, by the use of a coating, such as lecithin, by the maintenance of the required particle size in the case of dispersion and by the use of surfactants. The prevention of the action of microorganisms can be brought about by various antibacterial and antifungal agents, for example, parabens, chlorobutanol, phenol, sorbic acid, thimerosal, and the like. In many cases, it will be preferable to include isotonic agents, for example, sugars or sodium chloride. Prolonged absorption of the injectable compositions can be brought about by the use in the compositions of agents delaying absorption, for example, aluminum monostearate and gelatin.

[0397] For administration of an injectable aqueous solution, for example, the solution may be suitably buffered, if necessary, and the liquid diluent first rendered isotonic with sufficient saline or glucose. These particular aqueous solutions are especially suitable for intravenous, intramuscular, subcutaneous and intraperitoneal administration. In this connection, a sterile aqueous medium that can be employed will be known to those of skill in the art. For example, one dosage may be dissolved in 1 ml of isotonic NaCl solution and either added to 1000 ml of hypodermoclysis fluid or injected at the proposed site of infusion, (see for example, “Remington's Pharmaceutical Sciences” 15th Edition, pages 1035-1038 and 1570-1580). Some variation in dosage will necessarily occur depending on the condition of the host. The person responsible for administration will, in any event, determine the appropriate dose for the individual host.

[0398] Sterile injectable solutions are prepared by incorporating the active rAAV in the required amount in the appropriate solvent with various of the other ingredients enumerated herein, as required, followed by filtered sterilization. Generally, dispersions are prepared by incorporating the various sterilized active ingredients into a sterile vehicle which contains the basic dispersion medium and the required other ingredients from those enumerated above. In the case of sterile powders for the preparation of sterile injectable solutions, the preferred methods of preparation are vacuum-drying and freeze-drying techniques which yield a powder of the active ingredient plus any additional desired ingredient from a previously sterile-filtered solution thereof.

[0399] The rAAV compositions disclosed herein may also be formulated in a neutral or salt form. Pharmaceutically-acceptable salts, include the acid addition salts (formed with the free amino groups of the protein) and which are formed with inorganic acids such as, for example, hydrochloric or phosphoric acids, or such organic acids as acetic, oxalic, tartaric, mandelic, and the like. Salts formed with the free carboxyl groups can also be derived from inorganic bases such as, for example, sodium, potassium, ammonium, calcium, or ferric hydroxides, and such organic bases as isopropylamine, trimethylamine, histidine, procaine and the like. Upon formulation, solutions will be administered in a manner compatible with the dosage formulation and in such amount as is therapeutically effective. The formulations are easily administered in a variety of dosage forms such as injectable solutions, drug-release capsules, and the like.

[0400] Delivery vehicles such as liposomes, nanocapsules, microparticles, microspheres, lipid particles, vesicles, and the like, may be used for the introduction of the compositions of the present disclosure into suitable host cells. In particular, the rAAV vector delivered transgenes may be formulated for delivery either encapsulated in a lipid particle, a liposome, a vesicle, a nanosphere, or a nanoparticle or the like.

[0401] Such formulations may be preferred for the introduction of pharmaceutically acceptable formulations of the nucleic acids or the rAAV constructs disclosed herein. The formation and use of liposomes is generally known to those of skill in the art. Recently, liposomes were developed with improved serum stability and circulation half-times (U.S. Pat. No. 5,741,516). Further, various methods of liposome and liposome like preparations as potential drug carriers have been described (U.S. Pat. Nos. 5,567,434; 5,552,157; 5,565,213; 5,738,868 and 5,795,587).

[0402] In addition to the methods of delivery described above, the following techniques are also contemplated as alternative methods of delivering the rAAV compositions to a host. Sonophoresis (i.e., ultrasound) has been used and described in U.S. Pat. No. 5,656,016 as a device for enhancing the rate and efficacy of drug permeation into and through the circulatory system. Other drug delivery alternatives contemplated are intraosseous injection (U.S. Pat. No. 5,779,708), microchip devices (U.S. Pat. No. 5,797,898), ophthalmic formulations (Bourlais et al., 1998), transdermal matrices (U.S. Pat. Nos. 5,770,219 and 5,783,208) and feedback-controlled delivery (U.S. Pat. No. 5,697,899).

[0403] The administration of the subject compositions may be carried out in any convenient manner, including by aerosol inhalation, injection, ingestion, transfusion, implantation or transplantation. The compositions described herein may be administered to a subject trans arterially, subcutaneously, intradermally, intranodally, intramedullary, intramuscularly, by intravenous (i.v.) injection, or intraperitoneally. In one aspect, the nucleic acid compositions of the present disclosure are administered to a subject by intradermal or subcutaneous injection. In one aspect, the nucleic compositions of the present disclosure are administered by i.v. injection.

### Devices and Surgical Methods

[0404] Provided herein are technologies (e.g., systems, methods, devices, etc.) that may be used, in some aspects, for treating deafness and other hearing-associated diseases, disorders and conditions. Examples of such technologies are also included in, e.g., WO2017223193 and WO2019084145, each of which is herein incorporated by reference in its entirety. In one aspect, the present disclosure provides therapeutic delivery systems for treating deafness and other hearing-associated diseases, disorders and conditions. In one aspect, provided are therapeutic delivery systems that include i) a medical device capable of creating one or a plurality of incisions in a round window membrane of an inner ear of a human subject in need thereof, and ii) an effective dose of a therapeutic composition comprising one or a plurality of adeno-associated viral (AAV) vectors, wherein the one or the plurality of AAV vectors are capable of constituting a full-length auditory polypeptide messenger RNA in a target cell of the inner ear. In some aspects, of a means for performing a surgical method, the method comprises the steps of: administering intra-cochlearly to a human subject in need thereof an effective dose of a therapeutic composition of the present disclosure, wherein the therapeutic composition is capable of being administered by using a medical device which comprises: a) a means for creating one or a plurality of incisions in a round window membrane; and b) an effective dose of a therapeutic composition.

[0405] Provided herein are surgical methods for treatment of hearing loss. In one aspect, the methods include the steps of: introducing into a cochlea of a human subject a first incision at a first incision point; and administering intra-cochlearly an effective dose of a therapeutic composition (e.g., any of the compositions described herein) as provided herein. In one aspect, a therapeutic composition (e.g., any of the compositions described herein) is administered to the subject at a first incision point. In one aspect, a therapeutic composition is administered to a subject into or through a first incision. In one aspect, a therapeutic composition is administered to a subject into or through a cochlea oval window membrane. In one aspect, a therapeutic composition is administered to a subject into or through a cochlea round window membrane.

[0406] In some aspects, a composition disclosed herein can be administered to a subject with a surgical procedure. In some aspects, administration, e.g., via a surgical procedure, comprises injecting a composition disclosed herein via a delivery device as described herein into the inner ear. In some aspects, a surgical procedure disclosed herein comprises performing a transcanal tympanotomy; performing a laser-assisted micro-stapedotomy; and injecting a composition disclosed herein via a delivery device as described herein into the inner ear.

[0407] In some aspects, a surgical procedure comprises performing a transcanal tympanotomy; performing a laser-assisted micro-stapedotomy; injecting a composition disclosed herein via a delivery device as described herein into the inner ear; applying sealant around the round window and/or an oval window of the subject; and lowering a tympanomeatal flap of the subject to the anatomical position.

[0408] In some aspects, a surgical procedure comprises performing a transcanal tympanotomy; preparing a round window of the subject; performing a laser-assisted micro-stapedotomy; preparing both a delivery device as described herein and a composition disclosed herein for delivery to the inner ear; injecting a composition disclosed herein via the delivery device into the inner ear; applying sealant around the round window and/or an oval window of the subject; and lowering a tympanomeatal flap of the subject to the anatomical position.

[0409] In some aspects, performing a laser-assisted micro-stapedotomy includes using a KTP otologic laser and/or a CO2 otologic laser.

[0410] In some embodiments, a composition comprises one or a plurality of AAV vectors. In some aspects, when more than one AAV vector is included in the composition, the AAV vectors are each different. In some aspects, an AAV vector comprises an OTOF coding region, e.g., as described herein. In some aspects, a composition comprises an rAAV particle comprising an AAV vector described herein. In some aspects, the r AAV particle is encapsidated by an Anc80 capsid. In some aspect, the Anc80 capsid comprises a polypeptide of SEQ ID NO: 109.

[0411] For example, in one aspect, a therapeutic composition is administered using a medical device capable of creating a plurality of incisions in a round window membrane. In one aspect, a medical device includes a plurality of micro-needles. In one aspect, a medical device includes a plurality of micro-needles including a generally circular first aspect, wherein each micro-needle has a diameter of at least about 10 microns. In one aspect, a medical device includes a base and/or a reservoir capable of holding a therapeutic composition. In one aspect, a medical device includes a plurality of hollow micro-needles individually including a lumen capable of transferring a therapeutic composition. In one aspect, a medical device includes a means for generating at least a partial vacuum.

[0412] As another example, a composition disclosed herein is administered using a device and/or system specifically designed for intracochlear route of administration. In some aspects, design elements of a device described herein may include: maintenance of sterility of injected fluid; minimization of air bubbles introduced to the inner ear; ability to precisely deliver small volumes at a controlled rate; delivery through the external auditory canal by the surgeon; minimization of damage to the round window membrane (RWM), or to inner ear, e.g., cochlear structures beyond the RWM; and/or minimization of injected fluid leaking back out through the RWM.

[0413] The devices, systems, and methods provided herein also describe the potential for delivering a composition safely and efficiently into the inner ear, in order to treat conditions and disorders that would benefit from delivery of a composition disclosed herein to the inner ear, including, but not limited to, hearing disorders, e.g., as described herein. As another example, by placing a vent in the stapes footplate and injecting through the RWM, a composition disclosed herein is dispersed throughout the cochlea with minimal dilution at the site of action. The development of the described devices allows the surgical administration procedure to be performed through the external auditory canal in humans. The described devices can be removed from the ear following infusion of an amount of fluid into the perilymph of the cochlea. In subjects, the device may be advanced through the external auditory canal, either under surgical microscopic control or along with an endoscope.

[0414] An exemplary device for use in any of the methods disclosed herein is described in FIGS. 2-5. FIG. 2 illustrates an exemplary device 10 for delivering fluid to an inner ear. Device 10 includes a knurled handle 12, and a distal handle adhesive 14 (for example, an epoxy such as loctite 4014) that couples to a telescoping hypotube needle support 24. The knurled handle 12 (or handle portion) may include kurling features and/or grooves to enhance the grip. The knurled handle 12 (or handle portion) may be from about 5 mm to about 15 mm thick or from about 5 mm to about 12 mm thick, or from about 6 mm to about 10 mm thick, or from about 6 mm to about 9 mm thick, or from about 7 mm to about 8 mm thick. The knurled handle 12 (or handle portion) may be hollow such that fluid may pass through the device 10 during use. The device 10 may also include a proximal handle adhesive 16 at a proximal end 18 of the knurled handle 12, a needle sub-assembly 26 (shown in FIG. 3) with stopper 28 (shown in FIG. 3) at a distal end 20 of the device 10, and a strain relief feature 22. Strain relief feature 22 may be composed of a Santoprene material, a Pebax material, a polyurethane material, a silicone material, a nylon material, and/or a thermoplastic elastomer. The telescoping hypotube needle support 24 surrounds and supports a bent needle 38 (shown in FIG. 3) disposed therewithin.

[0415] Referring still to FIG. 2, the stopper 28 may be composed of a thermoplastic material or plastic polymer (such as a UV-cured polymer), as well as other suitable materials, and may be used to prevent the bent needle 38 from being inserted too far into the ear canal (for example, to prevent insertion of bent needle 38 into the lateral wall or other inner ear structure). Device 10 also may include a tapered portion 23 disposed between the knurled handle 12 and the distal handle adhesive 14 that is coupled to the telescoping hypotube needle support 24. The knurled handle 12 (or handle portion) may include the tapered portion 23 at the distal end of the handle portion 12. Device 10 may also include tubing 36 fluidly connected to the proximal end 16 the device 10 and acts as a fluid inlet line connecting the device to upstream components (for example, a pump, a syringe, and/or upstream components which, in some embodiments, may be coupled to a control system and/or power supply (not shown)). In some aspects, the bent needle 38 (shown in FIG. 3) extends from the distal end 20, through the telescoping hypotube needle support 24, through the tapered portion 23, through the knurled handle 12, and through the strain relief feature 22 and fluidly connects directly to the tubing 36. In other aspects, the bent needle 38 fluidly connects with the hollow interior of the knurled handle (for example, via the telescoping hypotube needle support 24) which in turn fluidly connects at a proximal end 16 with tubing 36. In aspects where the bent needle 38 does not extend all the way through the interior of the device 10, the contact area (for example, between overlapping nested hyotubes 42), the tolerances, and/or sealants between interfacing components must be sufficient to prevent therapeutic fluid from leaking out of the device 10 (which operates at a relatively low pressure (for example, from about 1 Pascal to about 50 Pa, or from about 2 Pa to about 20 Pa, or from about 3 Pa to about 10 Pa)).

[0416] FIG. 3 illustrates a sideview of the bent needle sub-assembly 26, according to aspects of the present disclosed aspects. Bent needle sub-assembly 26 includes a needle 38 that has a bent portion 32. Bent needle sub-assembly 26 may also include a stopper 28 coupled to the bent portion 32. The bent portion 32 includes an angled tip 34 at the distal end 20 of the device 10 for piercing a membrane of the ear (for example, the RWM). The needle 38, bent portion 32, and angled top 34 are hollow such that fluid may flow therethrough. The angle 46 (as shown in FIG. 5) of the bent portion 32 may vary. A stopper 28 geometry may be cylindrical, disk-shaped, annulus-shaped, dome-shaped, and/or other suitable shapes. Stopper 28 may be molded into place onto bent portion 32. For example, stopper 28 may be positioned concentrically around the bent portion 32 using adhesives or compression fitting. Examples of adhesives include an UV cure adhesive (such as Dymax 203A-CTH-F-T), elastomer adhesives, thermoset adhesives (such as epoxy or polyurthethane), or emulsion adhesives (such as polyvinyl acetate). Stopper 28 fits concentrically around the bent portion 32 such that angled tip 34 is inserted into the ear at a desired insertion depth. The bent needle 38 may be formed from a straight needle using incremental forming, as well as other suitable techniques.

[0417] FIG. 4 illustrates a perspective view of exemplary device 10 for delivering fluid to an inner ear. Tubing 36 may be from about 1300 mm in length (dimension 11 in FIG. 4) to about 1600 mm, or from about 1400 mm to about 1500 mm, or from about 1430 mm to about 1450 mm. Strain release feature 22 may be from about 25 mm to about 30 mm in length (dimension 15 in FIG. 4), or from about 20 mm to about 35 mm in length. Handle 12 may be about 155.4 mm in length (dimension 13 in FIG. 4), or from about 150 mm to about 160 mm, or from about 140 mm to about 170 mm. The telescoping hypotube needle support 24 may have two or more nested hypotubes, for example three nested hypotubes 42A, 42B, and 42C, or four nested hypotubes 42A, 42B, 42C, and 42D. The total length of hypotubes 42A, 42B, 42C and tip assembly 26 (dimension 17 in FIG. 4) may be from about 25 mm to about 45 mm, or from about 30 mm to about 40 mm, or about 35 mm. In addition, telescoping hypotube needle support 24 may have a length of about 36 mm, or from about 25 mm to about 45 mm, or form about 30 mm to about 40 mm. The three nested hypotubes 42A, 42B, and 42C each may have a length of 3.5 mm, 8.0 mm, and 19.8 mm, respectively, plus or minus about 20%. The inner-most nested hypotube (or most narrow portion) of the telescoping hypotube needle support 24 may be concentrically disposed around needle 38.

[0418] FIG. 5 illustrates a perspective view of bent needle sub-assembly 26 coupled to the distal end 20 of device 10, according to aspects of the present disclosed aspects. As shown in FIG. 5, bent needle sub-assembly 26 may include a needle 38 coupled to a bent portion 32. In other aspects, the bent needle 38 may be a single needle (for example, a straight needle that is then bent such that it includes the desired angle 46). Needle 38 may be a 33-gauge needle, or may include a gauge from about 32 to about 34, or from about 31 to 35. At finer gauges, care must be taken to ensure tubing 36 is not kinked or damaged. Needle 38 may be attached to handle 12 for safe and accurate placement of needle 38 into the inner ear. As shown in FIG. 5, bent needle sub-assembly 26 may also include a stopper 28 disposed around bent portion 32. FIG. 5 also shows that bent portion 32 may include an angled tip 34 for piercing a membrane of the ear (for example, the RWM). Stopper 28 may have a height 48 of about 0.5 mm, or from about 0.4 mm to about 0.6 mm, or from about 0.3 mm to about 0.7 mm. Bent portion 32 may have a length 52 of about 1.45 mm, or from about 1.35 mm to about 1.55 mm, or from about 1.2 mm to about 1.7 mm. In other aspects, the bent portion 32 may have a length greater than 2.0 mm such that the distance between the distal end of the stopper 28 and the distal end of the angled tip 34 is from about 0.5 mm to about 1.7 mm, or from about 0.6 mm to about 1.5 mm, or from about 0.7 mm to about 1.3 mm, or from about 0.8 mm to about 1.2 mm. FIG. 5 shows that stopper 28 may have a geometry that is cylindrical, disk-shaped, and/or dome-shaped. A person of ordinary skill will appreciate that other geometries could be used.

[0419] The disclosure is further described in detail by reference to the following experimental examples. These examples are provided for purposes of illustration only, and are not intended to be limiting unless otherwise specified. Thus, the disclosure should in no way be construed as being limited to the following examples, but rather should be construed to encompass any and all variations that become evident as a result of the teaching provided herein.

[0420] Other assays, including those described in the Example section herein as well as those that are known in the art, can also be used to evaluate the auditory polypeptide nucleic acids and nucleic acid constructs of the disclosure.

[0421] Without further description, it is believed that one of ordinary skill in the art can, using the preceding description and the following illustrative examples, make and utilize the compounds of the present disclosure and practice the claimed methods. The following working examples specifically point out various aspects of the present disclosure, and are not to be construed as limiting in any way the remainder of the disclosure.

### EXAMPLES

### Example 1: Adeno-Associated Virus (AAV) Trans-Splicing Strategy

[0422] Two different rAAV vectors can be used to reconstitute an active otoferlin gene (e.g., a full-length otoferlin gene) within a cell following intermolecular concatamerization and trans-splicing. See, e.g., Yan et al., Proc. Natl. Acad. Sci. U.S.A. 97:12; 6716-6721, 2000, incorporated in its entirety herein.

[0423] In some aspects, two different rAAV vectors will be used. In some aspects, the first rAAV vector comprises a first expression cassette comprising a promoter (e.g., any of the promoters described herein), a first coding sequence that encodes an N-terminal portion of an otoferlin protein positioned 3′ of the promoter (e.g., any of the sizes of a portion of an otoferlin protein described herein and/or any of the N-terminal portions of an otoferlin protein described herein), and a splicing donor signal sequence positioned at the 3′ end of the first coding sequence.

[0424] In some aspects, the second rAAV vector comprises a second expression cassette comprising a splicing acceptor signal sequence, a second coding sequence that encodes a C-terminal portion of an otoferlin protein (i.e., the entire portion of the otoferlin protein that is not included in the N-terminal portion) positioned at the 3′ end of the splicing acceptor signal sequence (e.g., any of the sizes of a portion of an otoferlin protein described herein and/or any of the C-terminal portions of an otoferlin protein described herein), and a polyadenylation sequence at 3′ end of the second coding sequence (e.g., any of the polyadenylation sequences described herein).

[0425] In some aspects, the first rAAV vector genome comprises a first expression cassette comprising a promoter (e.g., any of the promoters described herein), a first coding sequence that encodes an N-terminal portion of an otoferlin protein positioned 3′ of the promoter (e.g., any of the sizes of a portion of an otoferlin protein described herein and/or any of the N-terminal portions of an otoferlin protein described herein), and a splicing donor signal sequence positioned at the 3′ end of the first coding sequence.

[0426] In some aspects, the second rAAV vector genome comprises a second expression cassette comprising a splicing acceptor signal sequence, a second coding sequence that encodes a C-terminal portion of an otoferlin protein (i.e., the entire portion of the otoferlin protein that is not included in the N-terminal portion) positioned at the 3′ end of the splicing acceptor signal sequence (e.g., any of the sizes of a portion of an otoferlin protein described herein and/or any of the C-terminal portions of an otoferlin protein described herein), and a polyadenylation sequence at 3′ end of the second coding sequence (e.g., any of the polyadenylation sequences described herein).

[0427] In some aspects, each of the encoded portions is at least 30 amino acid residues in length (e.g., at least 50 amino acids, at least 75 amino acids, or at least 100 amino acids in length), the amino acid sequence of each of the encoded portions does not overlap with the sequence of the other encoded portion, and no single vector of the two different rAAV vectors encodes an active otoferlin protein (e.g., a full-length otoferlin protein). When the two coding sequences of the two rAAV vectors are expressed in a mammalian cell (e.g., any of the mammalian cells described herein), splicing occurs between the splicing donor signal sequence and the splicing acceptor signal sequence, thereby forming a recombined mRNA that encodes an active otoferlin protein (e.g., a full-length otoferlin protein).

[0428] In any of the examples of these methods, the amino acid sequence of each of the encoded portions does not overlap with the sequence any of the other encoded portions, and no single vector encodes an active otoferlin protein (e.g., a full-length otoferlin protein).

[0429] Each of the two different rAAV vectors includes a coding sequence that encodes a different portion of an otoferlin protein, each of the encoded portions can be at least 30 amino acids (e.g., between about 30 amino acids to about 1600 amino acids, or any of the other subranges of this range described herein).

[0430] In some aspects, each of the two different vectors includes a coding sequence that encodes a different portion of an otoferlin protein, each of the encoded portions can encode up to 80% of the amino acid sequence of SEQ ID NO: 5 (e.g., up to 10%, up to 20%, up to 30%, up to 40%, up to 50%, up to 60%, or up to 70% of SEQ ID NO: 5) such that each of the encoded portions is non-overlapping. In some aspects, each of the two different vectors includes a coding sequence that encodes a different portion of an otoferlin protein, each of the encoded portions encoding up to 80% of the amino acid sequence of SEQ ID NO: 5 (e.g., up to 10%, up to 20%, up to 30%, up to 40%, up to 50%, up to 60%, or up to 70% of SEQ ID NO: 5), such that each of the encoded portions is non-overlapping.

[0431] Each of the two rAAV vectors may further include an inverted terminal repeat (ITR) to allow head-to-tail recombination. The ITR will be subsequently removed via splicing. For example, the ITR could be a palindromic double-D ITR as described in Yan et al., Proc. Natl. Acad. Sci. U.S.A. 97 (12): 6716-6721, 2000, incorporated in its entirety herein. For example, the ITR could be a AAV serotype-2 ITR as described in Gosh et al., Mol. Ther. 16:124-130, 2008, and Gosh et al., Human Gene Ther. 22:77-83, 2011. Non-limiting examples of splicing acceptor and/or donor signal sequences are known in the art. See, e.g., Reich et al., Human Gene Ther. 14 (1): 37-44, 2003, and Lai et al. (2005) Nat. Biotechnol. 23 (11): 1435-1439, 2005, 2005. The splicing donor and acceptor signal sequences can be any endogenous intron splicing signal of a gene (e.g., an otoferlin gene).

For example, the splicing donor signal sequence
can be:
(SEQ ID NO: 64)
5′-GTAAGTATCAAGGTTACAAGACAGGTTTAAGGAGACCAATAGAAACT
GGGCTTGTCGAGACAGAGAAGACTCTTGCGTTTCT-3′
and the splicing acceptor signal can be:
(SEQ ID NO: 110)
5′-ATAGGCACCTATTGGTCTTACTGACATCCACTTTGCCTTTCTCTCCA
CAG-3′
(see, e.g., Trapani et al., EMBO Mol. Med. 6(2):
194-211,2014).

[0432] In some aspects, the splicing donor sequence has at least 70%, at least 75%, at least 80%, at least 85%, at least 90%, at least 91%, at least 92%, at least 93%, at least 94%, at least 95%, at least 96%, at least 97%, at least 98%, at least 90%, or 100% identity to SEQ ID NO: 102. In some aspects, the splicing donor sequence has the sequence of SEQ ID NO: 102.

[0433] In some aspects, the splicing acceptor sequence has at least 70%, at least 75%, at least 80%, at least 85%, at least 90%, at least 91%, at least 92%, at least 93%, at least 94%, at least 95%, at least 96%, at least 97%, at least 98%, at least 90%, or 100% identity to SEQ ID NO: 106. In some aspects, the splicing acceptor sequence has the sequence of SEQ ID NO: 106.

[0434] Methods of evaluating splicing and splicing efficiency are known in the art (see, e.g., Lai et al., Nat. Biotechnol. 23 (11): 1435-1439, 2005).

### Example 2: Hybrid Vector Trans-Splicing Strategy Using an Alkaline Phosphatase (AP) Highly Recombinogenic Exogenous Gene Region

[0435] Two different nucleic acid vectors (e.g., AAV vectors) can also be used in any of the methods described herein to reconstitute an active otoferlin gene (e.g., a full-length otoferlin gene) within a cell following intermolecular i) concatamerization, ii) recombination, iii) trans-splicing, iv) concatamerization and trans-splicing, or v) recombination and trans-splicing. This strategy is a hybrid strategy as it will include concatamerization, homologous recombination and/or trans-splicing. See, e.g., Gosh et al., Mol. Ther. 16:124-130, 2008; Gosh et al., Human Gene Ther. 22:77-83, 2011; and Duan et al., Mol. Ther. 4:383-391, 2001, each incorporated in its entirety herein.

[0436] Recombination can occur with a highly recombinogenic DNA sequence that will allow for coding sequence-independent recombination. An non-limiting example of a recombinogenic sequence is an alkaline phosphatase (AP) gene. For example, the recombinogenic sequence can be the middle one-third of the human placental AP complementary DNA, which is 872 bp in length (see, e.g., Gosh et al., 2008). The two different nucleic acid vectors will contain a recombinogenic sequence (e.g., any of the recombinogenic sequences described herein).

[0437] Since the hybrid vector will be constructed based on a trans-splicing vector as described in Example 7, an active otoferlin gene (e.g., a full-length otoferlin gene) may be reconstituted using either ITR-mediated recombination and trans-splicing or recombinogenic sequence mediated (e.g., AP-gene mediated) recombination and trans-splicing. After trans-splicing, an active otoferlin gene (e.g., a full-length otoferlin gene) will be reconstituted in the genomic DNA of a mammalian cell (e.g., any mammalian cell described herein).

[0438] In some aspects, the first rAAV vector can comprise a first expression cassette comprising a promoter (e.g., any of the promoters described herein), a first coding sequence that encodes an N-terminal portion of an otoferlin protein positioned 3′ of the promoter (e.g., any of the sizes of a portion of an otoferlin protein described herein and/or any of the N-terminal portions of an otoferlin protein described herein), a splicing donor signal sequence positioned at the 3′ end of the first coding sequence, and a first recombinogenic sequence sequence (e.g., an alkaline phosphatase recombinogenic sequence) positioned 3′ of the splicing donor signal sequence.

[0439] In some aspects, the second rAAV vector can comprise a second expression cassette comprising a second recombinogenic sequence sequence (e.g., an alkaline phosphatase recombinogenic sequence), a splicing acceptor signal sequence positioned 3′ of the second recombinogenic sequence, a second coding sequence that encodes a C-terminal portion of an otoferlin protein positioned at the 3′ end of the splicing acceptor signal sequence (e.g., any of the sizes of a portion of an otoferlin protein described herein and/or any of the C-terminal portions of an otoferlin protein described herein), and a polyadenylation sequence at 3′ end of the second coding sequence (e.g., any of the polyadenylation sequences described herein).

[0440] In some aspects, the first rAAV vector genome can comprise a first expression cassette comprising a promoter (e.g., any of the promoters described herein), a first coding sequence that encodes an N-terminal portion of an otoferlin protein positioned 3′ of the promoter (e.g., any of the sizes of a portion of an otoferlin protein described herein and/or any of the N-terminal portions of an otoferlin protein described herein), a splicing donor signal sequence positioned at the 3′ end of the first coding sequence, and a first recombinogenic sequence sequence (e.g., an alkaline phosphatase recombinogenic sequence) positioned 3′ of the splicing donor signal sequence.

[0441] In some aspects, the second rAAV vector genome can comprise a second expression cassette comprising a second recombinogenic sequence sequence (e.g., an alkaline phosphatase recombinogenic sequence), a splicing acceptor signal sequence positioned 3′ of the second recombinogenic sequence, a second coding sequence that encodes a C-terminal portion of an otoferlin protein positioned at the 3′ end of the splicing acceptor signal sequence (e.g., any of the sizes of a portion of an otoferlin protein described herein and/or any of the C-terminal portions of an otoferlin protein described herein), and a polyadenylation sequence at 3′ end of the second coding sequence (e.g., any of the polyadenylation sequences described herein).

[0442] In some aspects, each of the encoded portions is at least 30 amino acid residues in length (e.g., at least 50 amino acids, at least 75 amino acids, or at least 100 amino acids in length), the amino acid sequence of each of the encoded portions do not overlap, and no single vector of the two different vectors encodes an active otoferlin protein (e.g., a full-length otoferlin protein). When introduced into a mammalian cell (e.g., any of the mammalian cells described herein) splicing occurs between the splicing donor signal sequence and the splicing acceptor signal sequence, thereby forming an RNA acid that encodes an active otoferlin protein (e.g., a full-length otoferlin protein).

[0443] Based on the strategies provided above, one skilled in the art would understand how to develop a strategy using four, five, or six vectors.

[0444] The coding sequences provided in the two nucleic acid vectors (e.g., two, will not be overlapping. Each of the two different vectors can include a coding sequence that encodes a different portion of an otoferlin protein, each of the encoded portions being, e.g., at least 30 amino acids (e.g., about 30 amino acids to about 1600 amino acids, or any of the other subranges of this range described herein).

[0445] In some aspects, each of the two different rAAV vectors include a coding sequence that encodes a different portion of an otoferlin protein, each of the encoded portions encoding up to 80% of SEQ ID NO: 5 (e.g., up to 10%, up to 20%, up to 30%, up to 40%, up to 50%, up to 60%, up to 70% of SEQ ID NO: 5) such that each of the encoded portions is non-overlapping. In some aspects, each of the two different rAAV vectors include a coding sequence that encodes a different portion of an otoferlin protein, each of the encoded portions encoding up to 80% of SEQ ID NO: 5 (e.g., up to 10%, up to 20%, up to 30%, up to 40%, up to 50%, up to 60%, or up to 70% of SEQ ID NO: 5), such that each of the encoded portions is non-overlapping.

[0446] As described in Example 7, each of the two rAAV vectors may further include an inverted terminal repeat (ITR) to allow head-to-tail recombination. The ITR will be subsequently removed via splicing. Examples of ITRs and splicing acceptor and/or donor signal sequences are known in the art and have been described in Example 7.

### Example 3: Hybrid Vector Trans-Splicing Strategy Using a F1 Phage Highly Recombinogenic Exogenous Gene Region (AK)

[0447] Two different rAAV vectors can also be used in any of the methods described herein to reconstitute an active otoferlin gene (e.g., a full-length otoferlin gene) within a cell following intermolecular i) concatamerization, ii) recombination, iii) trans-splicing, iv) concatamerization and trans-splicing, or v) recombination and trans-splicing. This strategy is a hybrid strategy as it will include concatamerization, homologous recombination and/or trans-splicing. See, e.g., Trapani et al., EMBO Mol. Med. 6 (2): 194-211, 2014, incorporated in its entirety herein.

[0448] As used herein, an F1 phage recombinogenic region (AK) will be used to allow coding sequence-independent recombination. The F1 phage recombinogenic region may be a 77 bp recombinogenic region from the F1 phage genome as described in Trapani et al. (2014) EMBO Mol. Med. 6 (2): 194-211, 2014. The two different rAAV vectors will contain an F1 phage recombinogenic region. Since the hybrid vector will be constructed based on a trans-splicing vector as described in Example 7, a rAAV vector encoding an active otoferlin protein (e.g., a full-length stereocilin protein) may be generated using either ITR-mediated recombination and trans-splicing or F1 phage recombinogenic region-induced recombination and trans-splicing. After trans-splicing, a nucleic acid encoding an active otoferlin protein (e.g., a full-length otoferlin protein) will be generated in a mammalian cell (e.g., any of the mammalian cells described herein).

[0449] In some aspects, two rAAV vectors will be used. In some aspects, the first rAAV vector comprises a first expression cassette comprising a promoter (e.g., any of the promoters described herein), a first coding sequence that encodes an N-terminal portion of an otoferlin protein positioned 3′ of the promoter (e.g., any of the sizes of a portion of an otoferlin protein described herein and/or any of the N-terminal portions of an otoferlin protein described herein), a splicing donor signal sequence positioned at the 3′ end of the first coding sequence, and an F1 phage recombinogenic sequence positioned 3′ of the splicing donor signal sequence.

[0450] In some aspects, the second rAAV vector comprises a second expression cassette comprising an F1 phage recombinogenic region, a splicing acceptor signal sequence positioned 3′ of the F1 phage recombinogenic region, a second coding sequence that encodes a C-terminal portion of an otoferlin protein positioned at the 3′ end of the splicing acceptor signal sequence (e.g., any of the sizes of a portion of an otoferlin protein described herein and/or any of the C-terminal portions of an otoferlin protein described herein), and a polyadenylation sequence at 3′ end of the second coding sequence (e.g., any of the polyadenylation sequences described herein).

[0451] In some aspects, the first rAAV vector genome comprises a first expression cassette comprising a promoter (e.g., any of the promoters described herein), a first coding sequence that encodes an N-terminal portion of an otoferlin protein positioned 3′ of the promoter (e.g., any of the sizes of a portion of an otoferlin protein described herein and/or any of the N-terminal portions of an otoferlin protein described herein), a splicing donor signal sequence positioned at the 3′ end of the first coding sequence, and an F1 phage recombinogenic sequence positioned 3′ of the splicing donor signal sequence.

[0452] In some aspects, the second rAAV vector genome comprises a second expression cassette comprising an F1 phage recombinogenic region, a splicing acceptor signal sequence positioned 3′ of the F1 phage recombinogenic region, a second coding sequence that encodes a C-terminal portion of an otoferlin protein positioned at the 3′ end of the splicing acceptor signal sequence (e.g., any of the sizes of a portion of an otoferlin protein described herein and/or any of the C-terminal portions of an otoferlin protein described herein), and a polyadenylation sequence at 3′ end of the second coding sequence (e.g., any of the polyadenylation sequences described herein).

[0453] In some aspects, each of the encoded portions is at least 30 amino acid residues in length (e.g., at least 50 amino acids, at least 75 amino acids, or at least 100 amino acids in length), the amino acid sequence of each of the encoded portions do not overlap, and no single vector of the two different rAAV vectors encodes an active otoferlin protein (e.g., a full-length otoferlin protein). When the rAAV vectors are introduced into a mammalian cell (e.g., any of the mammalian cells described herein), splicing occurs between the splicing donor signal sequence and the splicing acceptor signal sequence, thereby forming a recombined nucleic acid that encodes an active otoferlin protein (e.g., a full-length otoferlin protein).

[0454] The coding sequences provided in each of the two rAAV vectors will not be overlapping. Each of the two different rAAV vectors include a coding sequence that encodes a different portion of an otoferlin protein, each of the encoded portions being at least 30 amino acids (e.g., about 30 amino acids to about 1600 amino acids, or any of the subranges of this range described herein).

[0455] In some aspects, each of the two different rAAV vectors include a coding sequence that encodes a different portion of an otoferlin protein, each of the encoded portions encoding at least one exon and at least one intron of SEQ ID NO: 12 (e.g., at least two exons and at least one intron, at least two exons and at least two introns, at least three exons at least one intron, at least three exons and at least two introns, or at least three exons and at least three introns). In some aspects, each of the two different rAAV vectors includes a coding sequence that encodes a different portion of an otoferlin protein, each of the encoded portions encoding up to 80% of SEQ ID NO: 5 (e.g., up to 10%, up to 20%, up to 30%, up to 40%, up to 50%, up to 60%, or up to 70% of SEQ ID NO: 5) such that each of the encoded portions is non-overlapping. In some aspects, each of the two different rAAV vectors include a coding sequence that encodes a different portion of an otoferlin protein, each of the encoded portions encoding up to 80% of SEQ ID NO: 5 (e.g., up to 10%, up to 20%, up to 30%, up to 40%, up to 50%, up to 60%, or up to 70% of SEQ ID NO: 5), such that each of the encoded portions is non-overlapping.

[0456] As described in Example 7 each of the at least two nucleic acid vectors may further include an inverted terminal repeat (ITR) to allow head-to-tail recombination. The ITR will be subsequently removed via splicing. Examples of ITRs and splicing acceptor and/or donor signals are known in the art and have been described in Example 7.

### Example 4: In Vitro Expression of Full-Length Human Otoferlin Using Two Vectors

[0457] As in other dual vector approaches, two transgenes, each comprising a portion of the full-length transcript, are packaged in separate vectors and provided, together, to contact a target, e.g., a target cell population in, e.g., a subject in need thereof. The present example provides a set of vectors which were generated to each include a nucleic acid sequence that comprises a portion of the coding sequence of the human otoferlin (OTOF) gene or OTOF cDNA.

[0458] AAVAnc80-hOTOF is comprised of two recombinant vectors (AAVAnc80-5′hOTOF and AAVAnc80-3′hOTOF) containing single-stranded DNA genomes of 4452 and 3905 nucleotides (exclusive of ITRs), respectively (FIG. 1). The single-stranded DNA genomes are encapsidated by the AAVAnc80 (also referred to as Anc80L65; Zinn 2015) capsid.

[0459] The upstream DNA genome (AAVAnc80-5′hOTOF) includes a eukaryotic expression cassette encoding the following promoter and regulatory sequences: the cytomegalovirus (CMV) early enhancer element (SEQ ID NO: 98); the chicken beta actin (CBA) gene sequence located between 5′ flanking region and the proximal region of the second exon (SEQ ID NO: 99); and 3′ splice sequence derived from the rabbit beta globin (RBG) gene (SEQ ID NO: 100). This is commonly referred to as the CAG promoter (Miyazaki 1989; Niwa 1991; Orbán 2009). Following this hybrid regulatory element are: the human OTOF (hOTOF) coding sequence, exons 1 through 21 (inclusive) (SEQ ID NO: 101); a synthetic splice donor (SD) to facilitate trans-splicing (Trapani 2014) (SEQ ID NO: 102); and a 77-base pair (bp) AK recombinogenic sequence (Trapani 2014; Trapani 2015) (SEQ ID NO: 103). The full-length AAVAnc80-5′hOTOF sequence has the sequence of SEQ ID NO: 96.

[0460] The downstream DNA genome (AAVAnc80-3′hOTOF) includes a eukaryotic expression cassette encoding the following: the same 77-bp AK recombinogenic sequence (Trapani 2014; Trapani 2015) (SEQ ID NO: 103); a synthetic splice acceptor (SA) to facilitate trans-splicing (Trapani 2014) (SEQ ID NO: 106); the human OTOF (hOTOF) coding sequence, exons 22 through 45 (inclusive) and exon 47, excluding non-coding exon 46 (SEQ ID NO: 107); and the bovine growth hormone (bGH) polyadenylation (pA) signal (SEQ ID NO: 108). Each expression cassette is flanked by AAV2 inverted terminal repeats (ITRs) (SEQ ID NOs: 97 and 104, respectively). The full-length AAVAnc80-3′hOTOF sequence has the sequence of SEQ ID NO: 105.

[0461] A target cell needs to receive a copy of both the upstream and the downstream transgene and, based on the dual vector design, these transgenes recombine at the DNA level and lead to generation of a full-length mRNA transcript (McClements 2017), specifically human OTOF based on isoform 5, according to NCBI accession number NM_001287489.1 (128 . . . 6121).

[0462] In some aspects, when each of the upstream and downstream vectors is administered to a subject in need thereof, the constructs concatemerize within a given cell. In some aspects, concatemerized full-length OTOF is expressed and generates functional otoferlin protein.

[0463] In some aspects, when each of the upstream and downstream vectors is administered to a subject in need thereof, the constructs recombine within a given cell. In some aspects, recombined full-length OTOF is expressed and generates functional otoferlin protein.

[0464] Pairs of these vectors are used to treat a human subject suffering from or susceptible to hearing loss. A composition comprising both vectors of the dual AAV vector system, AAVAnc80.AKhOTOF5 and AAVAnc80.AKhOTOF3, is introduced into at least one cochlea of the human subject. Hearing function is tested in the human subject at days 15, 30, 45, 60 and 90 after administration, and is compared to the functional hearing of the human subject prior to receiving treatment or to a human subject that did not receive treatment.

[0465] AAVAnc80-5′hOTOF The AAVAnc80-5′hOTOF construct comprises two ITRs (SEQ ID NO: 97 and 104), a CAG promoter (identified by SEQ ID NOs: 98, 99, and 100, comprising a CMV early enhancer element (SEQ ID NO: 98), chicken beta actin gene sequence (SEQ ID NO: 99), and a chimeric intron comprising 3′ splice sequence from the rabbit beta globin gene (SEQ ID NO: 100)), a 5′OTOF coding region (SEQ ID NO: 101), a SD intron sequence (SEQ ID NO: 102), and an AK recombinogenic sequence (SEQ ID NO: 103). The full-length AAVAnc80-5′hOTOF is represented by SEQ ID NO: 96.

TABLE 1
AAVAnc80-5′hOTOF

| | | SEQ ID |
|---|---|---|
| Name | SEQUENCE | NO |
| AAVAnc80- | TTGGCCACTCCCTCTCTGCGCGCTCGCTCGCTCACTGAGGCCGCC | 96 |
| 5′hOTOF | CGGGCAAAGCCCGGGCGTCGGGCGACCTTTGGTCGCCCGGCCTCA | |
| | GTGAGCGAGCGAGCGCGCAGAGAGGGAGTGGCCAACTCCATCACT | |
| | AGGGGTTCCTTTGTCGACGCGGCCGCACGCGTGACATTGATTATT | |
| | GACTAGTTATTAATAGTAATCAATTACGGGGTCATTAGTTCATAG | |
| | CCCATATATGGAGTTCCGCGTTACATAACTTACGGTAAATGGCCC | |
| | GCCTGGCTGACCGCCCAACGACCCCCGCCCATTGACGTCAATAAT | |
| | GACGTATGTTCCCATAGTAACGCCAATAGGGACTTTCCATTGACG | |
| | TCAATGGGTGGACTATTTACGGTAAACTGCCCACTTGGCAGTACA | |
| | TCAAGTGTATCATATGCCAAGTACGCCCCCTATTGACGTCAATGA | |
| | CGGTAAATGGCCCGCCTGGCATTATGCCCAGTACATGACCTTATG | |
| | GGACTTTCCTACTTGGCAGTACATCTACGTATTAGTCATCGCTAT | |
| | TACCATGGGTCGAGGTGAGCCCCACGTTCTGCTTCACTCTCCCCA | |
| | TCTCCCCCCCCTCCCCACCCCCAATTTTGTATTTATTTATTTTTT | |
| | AATTATTTTGTGCAGCGATGGGGGGGGGGGGGGGGGGGGGGGGCG | |
| | CGCCAGGCGGGGCGGGGGGGGGCGAGGGGCGGGGCGGGGCGAGGC | |
| | GGAGAGGTGCGGCGGCAGCCAATCAGAGCGGCGCGCTCCGAAAGT | |
| | TTCCTTTTATGGCGAGGCGGCGGCGGCGGCGGCCCTATAAAAAGC | |
| | GAAGCGCGCGGCGGGGGGGAGTCGCTGCGTTGCCTTCGCCCCGTG | |
| | CCCCGCTCCGCGCCGCCTCGCGCCGCCCGCCCCGGCTCTGACTGA | |
| | CCGCGTTACTCCCACAGGTGAGCGGGCGGGACGGCCCTTCTCCTC | |
| | CGGGCTGTAATTAGCGCTTGGTTTAATGACGGCTCGTTTCTTTTC | |
| | TGTGGCTGCGTGAAAGCCTTAAAGGGCTCCGGGAGGGCCCTTTGT | |
| | GCGGGGGGGAGCGGCTCGGGGGGTGCGTGCGTGTGTGTGTGCGTG | |
| | GGGAGCGCCGCGTGCGGCCCGCGCTGCCCGGCGGCTGTGAGCGCT | |
| | GCGGGCGCGGCGCGGGGCTTTGTGCGCTCCGCGTGTGCGCGAGGG | |
| | GAGCGCGGCCGGGGGCGGTGCCCCGCGGTGCGGGGGGGCTGCGAG | |
| | GGGAACAAAGGCTGCGTGCGGGGTGTGTGCGTGGGGGGGTGAGCA | |
| | GGGGGTGTGGGCGCGGCGGTCGGGCTGTAACCCCCCCCTGCACCC | |
| | CCCTCCCCGAGTTGCTGAGCACGGCCCGGCTTCGGGTGCGGGGCT | |
| | CCGTGCGGGGCGTGGCGCGGGGCTCGCCGTGCCGGGCGGGGGGTG | |
| | GCGGCAGGTGGGGGTGCCGGGGGGGGGGGGGCCGCCTCGGGCCGG | |
| | GGAGGGCTCGGGGGAGGGGCGCGGCGGCCCCCGGAGCGCCGGCGG | |
| | CTGTCGAGGCGCGGCGAGCCGCAGCCATTGCCTTTTATGGTAATC | |
| | GTGCGAGAGGGCGCAGGGACTTCCTTTGTCCCAAATCTGTGCGGA | |
| | GCCGAAATCTGGGAGGCGCCGCCGCACCCCCTCTAGCGGGCGCGG | |
| | GGCGAAGCGGTGCGGCGCCGGCAGGAAGGAAATGGGGGGGGAGGG | |
| | CCTTCGTGCGTCGCCGCGCCGCCGTCCCCTTCTCCCTCTCCAGCC | |
| | TCGGGGCTGTCCGCGGGGGGACGGCTGCCTTCGGGGGGGACGGGG | |
| | CAGGGGGGGGTTCGGCTTCTGGCGTGTGACCGGCGGCTCTAGAGC | |
| | CTCTGCTAACCATGTTCATGCCTTCTTCTTTTTCCTACAGCTCCT | |
| | GGGCAACGTGCTGGTTATTGTGACCGGTGCCACCATGGCCTTGCT | |
| | CATCCACCTCAAGACAGTCTCGGAGCTGCGGGGCAGGGGCGACCG | |
| | GATCGCCAAAGTGACTTTCCGAGGGCAATCCTTCTACTCTCGGGT | |
| | CCTGGAGAACTGTGAGGATGTGGCTGACTTTGATGAGACATTTCG | |
| | GTGGCCGGTGGCCAGCAGCATCGACAGAAATGAGATGCTGGAGAT | |
| | TCAGGTTTTCAACTACAGCAAAGTCTTCAGCAACAAGCTCATCGG | |
| | GACCTTCCGCATGGTGCTGCAGAAGGTGGTAGAGGAGAGCCATGT | |
| | GGAGGTGACTGACACGCTGATTGATGACAACAATGCTATCATCAA | |
| | GACCAGCCTGTGCGTGGAGGTCCGGTATCAGGCCACTGACGGCAC | |
| | AGTGGGCTCCTGGGACGATGGGGACTTCCTGGGAGATGAGTCTCT | |
| | TCAAGAGGAAGAGAAGGACAGCCAAGAGACGGATGGACTGCTCCC | |
| | AGGCTCCCGGCCCAGCTCCCGGCCCCCAGGAGAGAAGAGCTTCCG | |
| | GAGAGCCGGGAGGAGCGTGTTCTCCGCCATGAAGCTCGGCAAAAA | |
| | CAGGTCTCACAAGGAGGAGCCCCAAAGACCAGATGAACCGGCGGT | |
| | GCTGGAGATGGAAGACCTTGACCATCTGGCCATTCGGCTAGGAGA | |
| | TGGACTGGATCCCGACTCGGTGTCTCTAGCCTCAGTCACAGCTCT | |
| | CACCACTAATGTCTCCAACAAGCGATCTAAGCCAGACATTAAGAT | |
| | GGAGCCAAGTGCTGGGCGGCCCATGGATTACCAGGTCAGCATCAC | |
| | GGTGATCGAGGCCCGGCAGCTGGTGGGCTTGAACATGGACCCTGT | |
| | GGTGTGCGTGGAGGTGGGTGACGACAAGAAGTACACATCCATGAA | |
| | GGAGTCCACTAACTGCCCCTATTACAACGAGTACTTCGTCTTCGA | |
| | CTTCCATGTCTCTCCGGATGTCATGTTTGACAAGATCATCAAGAT | |
| | TTCGGTGATTCACTCCAAGAACCTGCTGCGCAGTGGCACCCTGGT | |
| | GGGCTCCTTCAAAATGGACGTGGGAACCGTGTACTCGCAGCCAGA | |
| | GCACCAGTTCCATCACAAGTGGGCCATCCTGTCTGACCCCGATGA | |
| | CATCTCCTCGGGGCTGAAGGGCTACGTGAAGTGTGACGTTGCCGT | |
| | GGTGGGCAAAGGGGACAACATCAAGACGCCCCACAAGGCCAATGA | |
| | GACCGACGAAGATGACATTGAGGGGAACTTGCTGCTCCCCGAGGG | |
| | GGTGCCCCCCGAACGCCAGTGGGCCCGGTTCTATGTGAAAATTTA | |
| | CCGAGCAGAGGGGCTGCCCCGTATGAACACAAGCCTCATGGCCAA | |
| | TGTAAAGAAGGCTTTCATCGGTGAAAACAAGGACCTCGTGGACCC | |
| | GCAGAAGAGCAGCTATGAGCCCCTGTGGAATGAGCAGGTCGTCTT | |
| | TACAGACCTCTTCCCCCCACTCTGCAAACGCATGAAGGTGCAGAT | |
| | CCGAGACTCGGACAAGGTCAACGACGTGGCCATCGGCACCCACTT | |
| | CATTGACCTGCGCAAGATTTCTAATGACGGAGACAAAGGCTTCCT | |
| | GCCCACACTGGGCCCAGCCTGGGTGAACATGTACGGCTCCACACG | |
| | TAACTACACGCTGCTGGATGAGCATCAGGACCTGAACGAGGGCCT | |
| | GGGGGAGGGTGTGTCCTTCCGGGCCCGGCTCCTGCTGGGCCTGGC | |
| | TGTGGAGATCGTAGACACCTCCAACCCTGAGCTCACCAGCTCCAC | |
| | AGAGGTGCAGGTGGAGCAGGCCACGCCCATCTCGGAGAGCTGTGC | |
| | AGGTAAAATGGAAGAATTCTTTCTCTTTGGAGCCTTCCTGGAGGC | |
| | CTCAATGATCGACCGGAGAAACGGAGACAAGCCCATCACCTTTGA | |
| | GGTCACCATAGGCAACTATGGGAACGAAGTTGATGGCCTGTCCCG | |
| | GCCCCAGCGGCCTCGGCCCCGGAAGGAGCCGGGGGATGAGGAAGA | |
| | AGTAGACCTGATTCAGAACGCAAGTGATGACGAGGCCGGTGATGC | |
| | CGGGGACCTGGCCTCAGTCTCCTCCACTCCACCAATGCGGCCCCA | |
| | GGTCACCGACAGGAACTACTTCCATCTGCCCTACCTGGAGCGAAA | |
| | GCCCTGCATCTACATCAAGAGCTGGTGGCCGGACCAGCGCCGCCG | |
| | CCTCTACAATGCCAACATCATGGACCACATTGCCGACAAGCTGGA | |
| | AGAAGGCCTGAACGACATACAGGAGATGATCAAAACGGAGAAGTC | |
| | CTACCCTGAGCGTCGCCTGCGGGGCGTCCTGGAGGAGCTGAGCTG | |
| | TGGCTGCTGCCGCTTCCTCTCCCTCGCTGACAAGGACCAGGGCCA | |
| | CTCATCCCGCACCAGGCTTGACCGGGAGCGCCTCAAGTCCTGCAT | |
| | GAGGGAGCTGGAAAACATGGGGCAGCAGGCCAGGATGCTGCGGGC | |
| | CCAGGTGAAGCGGCACACGGTGCGGGACAAGCTGAGGCTGTGCCA | |
| | GAACTTCCTGCAGAAGCTGCGCTTCCTGGCGGACGAGGTAAGTAT | |
| | CAAGGTTACAAGACAGGTTTAAGGAGACCAATAGAAACTGGGCTT | |
| | GTCGAGACAGAGAAGACTCTTGCGTTTCTGGGATTTTGCCGATTT | |
| | CGGCCTATTGGTTAAAAAATGAGCTGATTTAACAAAAATTTAACG | |
| | CGAATTTTAACAAAATAAGCTTGAATTCAGCTGACGTGCCTCGGA | |
| | CCGCCTAGGAGGAACCCCTAGTGATGGAGTTGGCCACTCCCTCTC | |
| | TGCGCGCTCGCTCGCTCACTGAGGCCGGGCGACCAAAGGTCGCCC | |
| | GACGCCCGGGCTTTGCCCGGGCGGCCTCAGTGAGCGAGCGAGCGC | |
| | GCAGAGAGGGAGTGGCCAA | |
| 5′ITR | TTGGCCACTCCCTCTCTGCGCGCTCGCTCGCTCACTGAGGCCGCC | 97 |
| | CGGGCAAAGCCCGGGCGTCGGGCGACCTTTGGTCGCCCGGCCTCA | |
| | GTGAGCGAGCGAGCGCGCAGAGAGGGAGTGGCCAACTCCATCACT | |
| | AGGGGTTCCT | |
| CMV | GACATTGATTATTGACTAGTTATTAATAGTAATCAATTACGGGGT | 98 |
| enhancer | CATTAGTTCATAGCCCATATATGGAGTTCCGCGTTACATAACTTA | |
| | CGGTAAATGGCCCGCCTGGCTGACCGCCCAACGACCCCCGCCCAT | |
| | TGACGTCAATAATGACGTATGTTCCCATAGTAACGCCAATAGGGA | |
| | CTTTCCATTGACGTCAATGGGTGGACTATTTACGGTAAACTGCCC | |
| | ACTTGGCAGTACATCAAGTGTATCATATGCCAAGTACGCCCCCTA | |
| | TTGACGTCAATGACGGTAAATGGCCCGCCTGGCATTATGCCCAGT | |
| | ACATGACCTTATGGGACTTTCCTACTTGGCAGTACATCTACGTAT | |
| | TAGTCATCGCTATTACCATGG | |
| CBA gene | GTCGAGGTGAGCCCCACGTTCTGCTTCACTCTCCCCATCTCCCCC | 99 |
| sequence | CCCTCCCCACCCCCAATTTTGTATTTATTTATTTTTTAATTATTT | |
| | TGTGCAGCGATGGGGGGGGGGGGGGGGGGGGGGGGCGCGCCAGGC | |
| | GGGGGGGGGCGGGGCGAGGGGCGGGGCGGGGCGAGGCGGAGAGGT | |
| | GCGGCGGCAGCCAATCAGAGCGGCGCGCTCCGAAAGTTTCCTTTT | |
| | ATGGCGAGGCGGCGGCGGCGGCGGCCCTATAAAAAGCGAAGCGCG | |
| | CGGCGGGCG | |
| Chimeric | GGAGTCGCTGCGTTGCCTTCGCCCCGTGCCCCGCTCCGCGCCGCC | 100 |
| intron | TCGCGCCGCCCGCCCCGGCTCTGACTGACCGCGTTACTCCCACAG | |
| | GTGAGCGGGCGGGACGGCCCTTCTCCTCCGGGCTGTAATTAGCGC | |
| | TTGGTTTAATGACGGCTCGTTTCTTTTCTGTGGCTGCGTGAAAGC | |
| | CTTAAAGGGCTCCGGGAGGGCCCTTTGTGCGGGGGGGAGCGGCTC | |
| | GGGGGGTGCGTGCGTGTGTGTGTGCGTGGGGAGCGCCGCGTGCGG | |
| | CCCGCGCTGCCCGGCGGCTGTGAGCGCTGCGGGCGCGGCGCGGGG | |
| | CTTTGTGCGCTCCGCGTGTGCGCGAGGGGAGCGCGGCCGGGGGCG | |
| | GTGCCCCGCGGTGCGGGGGGGCTGCGAGGGGAACAAAGGCTGCGT | |
| | GCGGGGTGTGTGCGTGGGGGGGTGAGCAGGGGGTGTGGGCGCGGC | |
| | GGTCGGGCTGTAACCCCCCCCTGCACCCCCCTCCCCGAGTTGCTG | |
| | AGCACGGCCCGGCTTCGGGTGCGGGGCTCCGTGCGGGGCGTGGCG | |
| | CGGGGCTCGCCGTGCCGGGGGGGGGGTGGCGGCAGGTGGGGGTGC | |
| | CGGGGGGGGGGGGGCCGCCTCGGGCCGGGGAGGGCTCGGGGGAGG | |
| | GGCGCGGCGGCCCCCGGAGCGCCGGCGGCTGTCGAGGCGCGGCGA | |
| | GCCGCAGCCATTGCCTTTTATGGTAATCGTGCGAGAGGGCGCAGG | |
| | GACTTCCTTTGTCCCAAATCTGTGCGGAGCCGAAATCTGGGAGGC | |
| | GCCGCCGCACCCCCTCTAGCGGGCGCGGGGCGAAGCGGTGCGGCG | |
| | CCGGCAGGAAGGAAATGGGCGGGGAGGGCCTTCGTGCGTCGCCGC | |
| | GCCGCCGTCCCCTTCTCCCTCTCCAGCCTCGGGGCTGTCCGCGGG | |
| | GGGACGGCTGCCTTCGGGGGGGACGGGGCAGGGGGGGGTTCGGCT | |
| | TCTGGCGTGTGACCGGCGGCTCTAGAGCCTCTGCTAACCATGTTC | |
| | ATGCCTTCTTCTTTTTCCTACAG | |
| 5′OTOF | ATGGCCTTGCTCATCCACCTCAAGACAGTCTCGGAGCTGCGGGGC | 101 |
| | AGGGGCGACCGGATCGCCAAAGTGACTTTCCGAGGGCAATCCTTC | |
| | TACTCTCGGGTCCTGGAGAACTGTGAGGATGTGGCTGACTTTGAT | |
| | GAGACATTTCGGTGGCCGGTGGCCAGCAGCATCGACAGAAATGAG | |
| | ATGCTGGAGATTCAGGTTTTCAACTACAGCAAAGTCTTCAGCAAC | |
| | AAGCTCATCGGGACCTTCCGCATGGTGCTGCAGAAGGTGGTAGAG | |
| | GAGAGCCATGTGGAGGTGACTGACACGCTGATTGATGACAACAAT | |
| | GCTATCATCAAGACCAGCCTGTGCGTGGAGGTCCGGTATCAGGCC | |
| | ACTGACGGCACAGTGGGCTCCTGGGACGATGGGGACTTCCTGGGA | |
| | GATGAGTCTCTTCAAGAGGAAGAGAAGGACAGCCAAGAGACGGAT | |
| | GGACTGCTCCCAGGCTCCCGGCCCAGCTCCCGGCCCCCAGGAGAG | |
| | AAGAGCTTCCGGAGAGCCGGGAGGAGCGTGTTCTCCGCCATGAAG | |
| | CTCGGCAAAAACAGGTCTCACAAGGAGGAGCCCCAAAGACCAGAT | |
| | GAACCGGCGGTGCTGGAGATGGAAGACCTTGACCATCTGGCCATT | |
| | CGGCTAGGAGATGGACTGGATCCCGACTCGGTGTCTCTAGCCTCA | |
| | GTCACAGCTCTCACCACTAATGTCTCCAACAAGCGATCTAAGCCA | |
| | GACATTAAGATGGAGCCAAGTGCTGGGCGGCCCATGGATTACCAG | |
| | GTCAGCATCACGGTGATCGAGGCCCGGCAGCTGGTGGGCTTGAAC | |
| | ATGGACCCTGTGGTGTGCGTGGAGGTGGGTGACGACAAGAAGTAC | |
| | ACATCCATGAAGGAGTCCACTAACTGCCCCTATTACAACGAGTAC | |
| | TTCGTCTTCGACTTCCATGTCTCTCCGGATGTCATGTTTGACAAG | |
| | ATCATCAAGATTTCGGTGATTCACTCCAAGAACCTGCTGCGCAGT | |
| | GGCACCCTGGTGGGCTCCTTCAAAATGGACGTGGGAACCGTGTAC | |
| | TCGCAGCCAGAGCACCAGTTCCATCACAAGTGGGCCATCCTGTCT | |
| | GACCCCGATGACATCTCCTCGGGGCTGAAGGGCTACGTGAAGTGT | |
| | GACGTTGCCGTGGTGGGCAAAGGGGACAACATCAAGACGCCCCAC | |
| | AAGGCCAATGAGACCGACGAAGATGACATTGAGGGGAACTTGCTG | |
| | CTCCCCGAGGGGGTGCCCCCCGAACGCCAGTGGGCCCGGTTCTAT | |
| | GTGAAAATTTACCGAGCAGAGGGGCTGCCCCGTATGAACACAAGC | |
| | CTCATGGCCAATGTAAAGAAGGCTTTCATCGGTGAAAACAAGGAC | |
| | CTCGTGGACCCCTACGTGCAAGTCTTCTTTGCTGGCCAGAAGGGC | |
| | AAGACTTCAGTGCAGAAGAGCAGCTATGAGCCCCTGTGGAATGAG | |
| | CAGGTCGTCTTTACAGACCTCTTCCCCCCACTCTGCAAACGCATG | |
| | AAGGTGCAGATCCGAGACTCGGACAAGGTCAACGACGTGGCCATC | |
| | GGCACCCACTTCATTGACCTGCGCAAGATTTCTAATGACGGAGAC | |
| | AAAGGCTTCCTGCCCACACTGGGCCCAGCCTGGGTGAACATGTAC | |
| | GGCTCCACACGTAACTACACGCTGCTGGATGAGCATCAGGACCTG | |
| | AACGAGGGCCTGGGGGAGGGTGTGTCCTTCCGGGCCCGGCTCCTG | |
| | CTGGGCCTGGCTGTGGAGATCGTAGACACCTCCAACCCTGAGCTC | |
| | ACCAGCTCCACAGAGGTGCAGGTGGAGCAGGCCACGCCCATCTCG | |
| | GAGAGCTGTGCAGGTAAAATGGAAGAATTCTTTCTCTTTGGAGCC | |
| | TTCCTGGAGGCCTCAATGATCGACCGGAGAAACGGAGACAAGCCC | |
| | ATCACCTTTGAGGTCACCATAGGCAACTATGGGAACGAAGTTGAT | |
| | GGCCTGTCCCGGCCCCAGCGGCCTCGGCCCCGGAAGGAGCCGGGG | |
| | GATGAGGAAGAAGTAGACCTGATTCAGAACGCAAGTGATGACGAG | |
| | GCCGGTGATGCCGGGGACCTGGCCTCAGTCTCCTCCACTCCACCA | |
| | ATGCGGCCCCAGGTCACCGACAGGAACTACTTCCATCTGCCCTAC | |
| | CTGGAGCGAAAGCCCTGCATCTACATCAAGAGCTGGTGGCCGGAC | |
| | CAGCGCCGCCGCCTCTACAATGCCAACATCATGGACCACATTGCC | |
| | GACAAGCTGGAAGAAGGCCTGAACGACATACAGGAGATGATCAAA | |
| | ACGGAGAAGTCCTACCCTGAGCGTCGCCTGCGGGGCGTCCTGGAG | |
| | GAGCTGAGCTGTGGCTGCTGCCGCTTCCTCTCCCTCGCTGACAAG | |
| | GACCAGGGCCACTCATCCCGCACCAGGCTTGACCGGGAGCGCCTC | |
| | AAGTCCTGCATGAGGGAGCTGGAAAACATGGGGCAGCAGGCCAGG | |
| | ATGCTGCGGGCCCAGGTGAAGCGGCACACGGTGCGGGACAAGCTG | |
| | AGGCTGTGCCAGAACTTCCTGCAGAAGCTGCGCTTCCTGGCGGAC | |
| | GAG | |
| SD intron | GTAAGTATCAAGGTTACAAGACAGGTTTAAGGAGACCAATAGAAA | 102 |
| | CTGGGCTTGTCGAGACAGAGAAGACTCTTGCGTTTCT | |
| AK | GGGATTTTGCCGATTTCGGCCTATTGGTTAAAAAATGAGCTGATT | 103 |
| | TAACAAAAATTTAACGCGAATTTTAACAAAAT | |
| 3′ITR | AGGAACCCCTAGTGATGGAGTTGGCCACTCCCTCTCTGCGCGCTC | 104 |
| | GCTCGCTCACTGAGGCCGGGCGACCAAAGGTCGCCCGACGCCCGG | |
| | GCTTTGCCCGGGCGGCCTCAGTGAGCGAGCGAGCGCGCAGAGAGG | |
| | GAGTGGCCAA | |

[0466] AAVAnc80-3′% OTOF The AAVAnc80-3′hOTOF construct comprises two ITRs (SEQ ID NOS: 97 and 104), an AK recombinogenic sequence (SEQ ID NO: 103), an SA intron sequence (SEQ ID NO:106), a 3′OTOF coding region (SEQ ID NO: 107), and a bgH polyA sequence (SEQ ID NO: 108). The full-length AAVAnc80-3′hOTOF is represented by SEQ ID NO: 105.

TABLE 2
AAVAnc80-3′hOTOF

| | | SEQ ID |
|---|---|---|
| Name | SEQUENCE | NO |
| AAVAnc80- | TTGGCCACTCCCTCTCTGCGCGCTCGCTCGCTCACTGAGGCCGCC | 105 |
| 3′hOTOF | CGGGCAAAGCCCGGGCGTCGGGCGACCTTTGGTCGCCCGGCCTCA | |
| | GTGAGCGAGCGAGCGCGCAGAGAGGGAGTGGCCAACTCCATCACT | |
| | AGGGGTTCCTTTGTCGACGCGGCCGCACGCGTGGGATTTTGCCGA | |
| | TTTCGGCCTATTGGTTAAAAAATGAGCTGATTTAACAAAAATTTA | |
| | ACGCGAATTTTAACAAAATGATAGGCACCTATTGGTCTTACTGAC | |
| | ATCCACTTTGCCTTTCTCTCCACAGCCCCAGCACAGCATTCCCGA | |
| | CATCTTCATCTGGATGATGAGCAACAACAAGCGTGTCGCCTATGC | |
| | CCGTGTGCCCTCCAAGGACCTGCTCTTCTCCATCGTGGAGGAGGA | |
| | GACTGGCAAGGACTGCGCCAAGGTCAAGACGCTCTTCCTTAAGCT | |
| | GCCAGGGAAGCGGGGCTTCGGCTCGGCAGGCTGGACAGTGCAGGC | |
| | CAAGGTGGAGCTGTACCTGTGGCTGGGCCTCAGCAAACAGCGCAA | |
| | GGAGTTCCTGTGCGGCCTGCCCTGTGGCTTCCAGGAGGTCAAGGC | |
| | AGCCCAGGGCCTGGGCCTGCATGCCTTCCCACCCGTCAGCCTGGT | |
| | CTACACCAAGAAGCAGGCGTTCCAGCTCCGAGCGCACATGTACCA | |
| | GGCCCGCAGCCTCTTTGCCGCCGACAGCAGCGGACTCTCAGACCC | |
| | CTTTGCCCGCGTCTTCTTCATCAATCAGAGTCAGTGCACAGAGGT | |
| | GCTGAATGAGACCCTGTGTCCCACCTGGGACCAGATGCTGGTGTT | |
| | CGACAACCTGGAGCTCTATGGTGAAGCTCATGAGCTGAGGGACGA | |
| | TCCGCCCATCATTGTCATTGAAATCTATGACCAGGATTCCATGGG | |
| | CAAAGCTGACTTCATGGGCCGGACCTTCGCCAAACCCCTGGTGAA | |
| | GATGGCAGACGAGGCGTACTGCCCACCCCGCTTCCCACCTCAGCT | |
| | CGAGTACTACCAGATCTACCGTGGCAACGCCACAGCTGGAGACCT | |
| | GCTGGCGGCCTTCGAGCTGCTGCAGATTGGACCAGCAGGGAAGGC | |
| | TGACCTGCCCCCCATCAATGGCCCGGTGGACGTGGACCGAGGTCC | |
| | CATCATGCCCGTGCCCATGGGCATCCGGCCCGTGCTCAGCAAGTA | |
| | CCGAGTGGAGGTGCTGTTCTGGGGCCTACGGGACCTAAAGCGGGT | |
| | GAACCTGGCCCAGGTGGACCGGCCACGGGTGGACATCGAGTGTGC | |
| | AGGGAAGGGGGTGCAGTCGTCCCTGATCCACAATTATAAGAAGAA | |
| | CCCCAACTTCAACACCCTCGTCAAGTGGTTTGAAGTGGACCTCCC | |
| | AGAGAACGAGCTGCTGCACCCGCCCTTGAACATCCGTGTGGTGGA | |
| | CTGCCGGGCCTTCGGTCGCTACACACTGGTGGGCTCCCATGCCGT | |
| | CAGCTCCCTGCGACGCTTCATCTACCGGCCCCCAGACCGCTCGGC | |
| | CCCCAGCTGGAACACCACGGTCAGGCTTCTCCGGCGCTGCCGTGT | |
| | GCTGTGCAATGGGGGCTCCTCCTCTCACTCCACAGGGGAGGTTGT | |
| | GGTGACTATGGAGCCAGAGGTACCCATCAAGAAACTGGAGACCAT | |
| | GGTGAAGCTGGACGCGACTTCTGAAGCTGTTGTCAAGGTGGATGT | |
| | GGCTGAGGAGGAGAAGGAGAAGAAGAAGAAGAAGAAGGGCACTGC | |
| | GGAGGAGCCAGAGGAGGAGGAGCCAGACGAGAGCATGCTGGACTG | |
| | GTGGTCCAAGTACTTTGCCTCCATTGACACCATGAAGGAGCAACT | |
| | TCGACAACAAGAGCCCTCTGGAATTGACTTGGAGGAGAAGGAGGA | |
| | AGTGGACAATACCGAGGGCCTGAAGGGGTCAATGAAGGGCAAGGA | |
| | GAAGGCAAGGGCTGCCAAAGAGGAGAAGAAGAAGAAAACTCAGAG | |
| | CTCTGGCTCTGGCCAGGGGTCCGAGGCCCCCGAGAAGAAGAAACC | |
| | CAAGATTGATGAGCTTAAGGTATACCCCAAAGAGCTGGAGTCCGA | |
| | GTTTGATAACTTTGAGGACTGGCTGCACACTTTCAACTTGCTTCG | |
| | GGGCAAGACCGGGGATGATGAGGATGGCTCCACCGAGGAGGAGCG | |
| | CATTGTGGGACGCTTCAAGGGCTCCCTCTGCGTGTACAAAGTGCC | |
| | ACTCCCAGAGGACGTGTCCCGGGAAGCCGGCTACGACTCCACCTA | |
| | CGGCATGTTCCAGGGCATCCCGAGCAATGACCCCATCAATGTGCT | |
| | GGTCCGAGTCTATGTGGTCCGGGCCACGGACCTGCACCCTGCTGA | |
| | CATCAACGGCAAAGCTGACCCCTACATCGCCATCCGGCTAGGCAA | |
| | GACTGACATCCGCGACAAGGAGAACTACATCTCCAAGCAGCTCAA | |
| | CCCTGTCTTTGGGAAGTCCTTTGACATCGAGGCCTCCTTCCCCAT | |
| | GGAATCCATGCTGACGGTGGCTGTGTATGACTGGGACCTGGTGGG | |
| | CACTGATGACCTCATTGGGGAAACCAAGATCGACCTGGAGAACCG | |
| | CTTCTACAGCAAGCACCGCGCCACCTGCGGCATCGCCCAGACCTA | |
| | CTCCACACATGGCTACAATATCTGGCGGGACCCCATGAAGCCCAG | |
| | CCAGATCCTGACCCGCCTCTGCAAAGACGGCAAAGTGGACGGCCC | |
| | CCACTTTGGGCCCCCTGGGAGAGTGAAGGTGGCCAACCGCGTCTT | |
| | CACTGGGCCCTCTGAGATTGAGGACGAGAACGGTCAGAGGAAGCC | |
| | CACAGACGAGCATGTGGCGCTGTTGGCCCTGAGGCACTGGGAGGA | |
| | CATCCCCCGCGCAGGCTGCCGCCTGGTGCCAGAGCATGTGGAGAC | |
| | GAGGCCGCTGCTCAACCCCGACAAGCCGGGCATCGAGCAGGGCCG | |
| | CCTGGAGCTGTGGGTGGACATGTTCCCCATGGACATGCCAGCCCC | |
| | TGGGACGCCTCTGGACATCTCACCTCGGAAGCCCAAGAAGTACGA | |
| | GCTGCGGGTCATCATCTGGAACACAGATGAGGTGGTCTTGGAGGA | |
| | CGACGACTTCTTCACAGGGGAGAAGTCCAGTGACATCTTCGTGAG | |
| | GGGGTGGCTGAAGGGCCAGCAGGAGGACAAGCAGGACACAGACGT | |
| | CCACTACCACTCCCTCACTGGCGAGGGCAACTTCAACTGGCGCTA | |
| | CCTGTTCCCCTTCGACTACCTGGCGGCGGAGGAGAAGATCGTCAT | |
| | CTCCAAGAAGGAGTCCATGTTCTCCTGGGACGAGACCGAGTACAA | |
| | GATCCCCGCGCGGCTCACCCTGCAGATCTGGGATGCGGACCACTT | |
| | CTCCGCTGACGACTTCCTGGGGGCCATCGAGCTGGACCTGAACCG | |
| | GTTCCCGCGGGGCGCAAAGACAGCCAAGCAGTGCACCATGGAGAT | |
| | GGCCACCGGGGAGGTGGACGTGCCCCTCGTGTCCATCTTCAAGCA | |
| | AAAGCGCGTCAAAGGCTGGTGGCCCCTCCTGGCCCGCAATGAGAA | |
| | CGATGAGTTTGAGCTCACGGGCAAGGTGGAGGCTGAGCTGCATTT | |
| | ACTGACAGCAGAGGAGGCAGAGAAGAACCCAGTGGGCCTGGCCCG | |
| | CAATGAACCTGACCCCCTAGAGAAACCCAACCGGCCCGACACGGC | |
| | CTTCGTCTGGTTCCTCAACCCTCTCAAGTCCATCAAGTACCTCAT | |
| | CTGCACCCGGTACAAGTGGCTCATCATCAAGATCGTGCTGGCGCT | |
| | GTTGGGGCTGCTCATGTTGGGGCTCTTCCTCTACAGCCTCCCTGG | |
| | CTACATGGTCAAAAAGCTCCTTGGGGCATGAACTAGTGCTGATCA | |
| | GCCTCGACTGTGCCTTCTAGTTGCCAGCCATCTGTTGTTTGCCCC | |
| | TCCCCCGTGCCTTCCTTGACCCTGGAAGGTGCCACTCCCACTGTC | |
| | CTTTCCTAATAAAATGAGGAAATTGCATCGCATTGTCTGAGTAGG | |
| | TGTCATTCTATTCTGGGGGGTGGGGTGGGGCAGGACAGCAAGGGG | |
| | GAGGATTGGGAAGACAATAGCAGGCATGCTGGGGATGCGGTGGGC | |
| | TCTATGGAAGCTTGAATTCAGCTGACGTGCCTCGGACCGCCTAGG | |
| | AGGAACCCCTAGTGATGGAGTTGGCCACTCCCTCTCTGCGCGCTC | |
| | GCTCGCTCACTGAGGCCGGGCGACCAAAGGTCGCCCGACGCCCGG | |
| | GCTTTGCCCGGGCGGCCTCAGTGAGCGAGCGAGCGCGCAGAGAGG | |
| | GAGTGGCCAA | |
| 5′ITR | TTGGCCACTCCCTCTCTGCGCGCTCGCTCGCTCACTGAGGCCGCC | 97 |
| | CGGGCAAAGCCCGGGCGTCGGGCGACCTTTGGTCGCCCGGCCTCA | |
| | GTGAGCGAGCGAGCGCGCAGAGAGGGAGTGGCCAACTCCATCACT | |
| | AGGGGTTCCT | |
| AK | GGGATTTTGCCGATTTCGGCCTATTGGTTAAAAAATGAGCTGATT | 103 |
| | TAACAAAAATTTAACGCGAATTTTAACAAAAT | |
| SA intron | GATAGGCACCTATTGGTCTTACTGACATCCACTTTGCCTTTCTCT | 106 |
| | CCACAG | |
| 3′OTOF | CCCCAGCACAGCATTCCCGACATCTTCATCTGGATGATGAGCAAC | 107 |
| | AACAAGCGTGTCGCCTATGCCCGTGTGCCCTCCAAGGACCTGCTC | |
| | TTCTCCATCGTGGAGGAGGAGACTGGCAAGGACTGCGCCAAGGTC | |
| | AAGACGCTCTTCCTTAAGCTGCCAGGGAAGCGGGGCTTCGGCTCG | |
| | GCAGGCTGGACAGTGCAGGCCAAGGTGGAGCTGTACCTGTGGCTG | |
| | GGCCTCAGCAAACAGCGCAAGGAGTTCCTGTGCGGCCTGCCCTGT | |
| | GGCTTCCAGGAGGTCAAGGCAGCCCAGGGCCTGGGCCTGCATGCC | |
| | TTCCCACCCGTCAGCCTGGTCTACACCAAGAAGCAGGCGTTCCAG | |
| | CTCCGAGCGCACATGTACCAGGCCCGCAGCCTCTTTGCCGCCGAC | |
| | AGCAGCGGACTCTCAGACCCCTTTGCCCGCGTCTTCTTCATCAAT | |
| | CAGAGTCAGTGCACAGAGGTGCTGAATGAGACCCTGTGTCCCACC | |
| | TGGGACCAGATGCTGGTGTTCGACAACCTGGAGCTCTATGGTGAA | |
| | GCTCATGAGCTGAGGGACGATCCGCCCATCATTGTCATTGAAATC | |
| | TATGACCAGGATTCCATGGGCAAAGCTGACTTCATGGGCCGGACC | |
| | TTCGCCAAACCCCTGGTGAAGATGGCAGACGAGGCGTACTGCCCA | |
| | CCCCGCTTCCCACCTCAGCTCGAGTACTACCAGATCTACCGTGGC | |
| | AACGCCACAGCTGGAGACCTGCTGGCGGCCTTCGAGCTGCTGCAG | |
| | ATTGGACCAGCAGGGAAGGCTGACCTGCCCCCCATCAATGGCCCG | |
| | GTGGACGTGGACCGAGGTCCCATCATGCCCGTGCCCATGGGCATC | |
| | CGGCCCGTGCTCAGCAAGTACCGAGTGGAGGTGCTGTTCTGGGGC | |
| | CTACGGGACCTAAAGCGGGTGAACCTGGCCCAGGTGGACCGGCCA | |
| | CGGGTGGACATCGAGTGTGCAGGGAAGGGGGTGCAGTCGTCCCTG | |
| | ATCCACAATTATAAGAAGAACCCCAACTTCAACACCCTCGTCAAG | |
| | TGGTTTGAAGTGGACCTCCCAGAGAACGAGCTGCTGCACCCGCCC | |
| | TTGAACATCCGTGTGGTGGACTGCCGGGCCTTCGGTCGCTACACA | |
| | CTGGTGGGCTCCCATGCCGTCAGCTCCCTGCGACGCTTCATCTAC | |
| | CGGCCCCCAGACCGCTCGGCCCCCAGCTGGAACACCACGGTCAGG | |
| | CTTCTCCGGCGCTGCCGTGTGCTGTGCAATGGGGGCTCCTCCTCT | |
| | CACTCCACAGGGGAGGTTGTGGTGACTATGGAGCCAGAGGTACCC | |
| | ATCAAGAAACTGGAGACCATGGTGAAGCTGGACGCGACTTCTGAA | |
| | GCTGTTGTCAAGGTGGATGTGGCTGAGGAGGAGAAGGAGAAGAAG | |
| | AAGAAGAAGAAGGGCACTGCGGAGGAGCCAGAGGAGGAGGAGCCA | |
| | GACGAGAGCATGCTGGACTGGTGGTCCAAGTACTTTGCCTCCATT | |
| | GACACCATGAAGGAGCAACTTCGACAACAAGAGCCCTCTGGAATT | |
| | GACTTGGAGGAGAAGGAGGAAGTGGACAATACCGAGGGCCTGAAG | |
| | GGGTCAATGAAGGGCAAGGAGAAGGCAAGGGCTGCCAAAGAGGAG | |
| | AAGAAGAAGAAAACTCAGAGCTCTGGCTCTGGCCAGGGGTCCGAG | |
| | GCCCCCGAGAAGAAGAAACCCAAGATTGATGAGCTTAAGGTATAC | |
| | CCCAAAGAGCTGGAGTCCGAGTTTGATAACTTTGAGGACTGGCTG | |
| | CACACTTTCAACTTGCTTCGGGGCAAGACCGGGGATGATGAGGAT | |
| | GGCTCCACCGAGGAGGAGCGCATTGTGGGACGCTTCAAGGGCTCC | |
| | CTCTGCGTGTACAAAGTGCCACTCCCAGAGGACGTGTCCCGGGAA | |
| | GCCGGCTACGACTCCACCTACGGCATGTTCCAGGGCATCCCGAGC | |
| | AATGACCCCATCAATGTGCTGGTCCGAGTCTATGTGGTCCGGGCC | |
| | ACGGACCTGCACCCTGCTGACATCAACGGCAAAGCTGACCCCTAC | |
| | ATCGCCATCCGGCTAGGCAAGACTGACATCCGCGACAAGGAGAAC | |
| | TACATCTCCAAGCAGCTCAACCCTGTCTTTGGGAAGTCCTTTGAC | |
| | ATCGAGGCCTCCTTCCCCATGGAATCCATGCTGACGGTGGCTGTG | |
| | TATGACTGGGACCTGGTGGGCACTGATGACCTCATTGGGGAAACC | |
| | AAGATCGACCTGGAGAACCGCTTCTACAGCAAGCACCGCGCCACC | |
| | TGCGGCATCGCCCAGACCTACTCCACACATGGCTACAATATCTGG | |
| | CGGGACCCCATGAAGCCCAGCCAGATCCTGACCCGCCTCTGCAAA | |
| | GACGGCAAAGTGGACGGCCCCCACTTTGGGCCCCCTGGGAGAGTG | |
| | AAGGTGGCCAACCGCGTCTTCACTGGGCCCTCTGAGATTGAGGAC | |
| | GAGAACGGTCAGAGGAAGCCCACAGACGAGCATGTGGCGCTGTTG | |
| | GCCCTGAGGCACTGGGAGGACATCCCCCGCGCAGGCTGCCGCCTG | |
| | GTGCCAGAGCATGTGGAGACGAGGCCGCTGCTCAACCCCGACAAG | |
| | CCGGGCATCGAGCAGGGCCGCCTGGAGCTGTGGGTGGACATGTTC | |
| | CCCATGGACATGCCAGCCCCTGGGACGCCTCTGGACATCTCACCT | |
| | CGGAAGCCCAAGAAGTACGAGCTGCGGGTCATCATCTGGAACACA | |
| | GATGAGGTGGTCTTGGAGGACGACGACTTCTTCACAGGGGAGAAG | |
| | TCCAGTGACATCTTCGTGAGGGGGTGGCTGAAGGGCCAGCAGGAG | |
| | GACAAGCAGGACACAGACGTCCACTACCACTCCCTCACTGGCGAG | |
| | GGCAACTTCAACTGGCGCTACCTGTTCCCCTTCGACTACCTGGCG | |
| | GCGGAGGAGAAGATCGTCATCTCCAAGAAGGAGTCCATGTTCTCC | |
| | TGGGACGAGACCGAGTACAAGATCCCCGCGCGGCTCACCCTGCAG | |
| | ATCTGGGATGCGGACCACTTCTCCGCTGACGACTTCCTGGGGGCC | |
| | ATCGAGCTGGACCTGAACCGGTTCCCGCGGGGCGCAAAGACAGCC | |
| | AAGCAGTGCACCATGGAGATGGCCACCGGGGAGGTGGACGTGCCC | |
| | CTCGTGTCCATCTTCAAGCAAAAGCGCGTCAAAGGCTGGTGGCCC | |
| | CTCCTGGCCCGCAATGAGAACGATGAGTTTGAGCTCACGGGCAAG | |
| | GTGGAGGCTGAGCTGCATTTACTGACAGCAGAGGAGGCAGAGAAG | |
| | AACCCAGTGGGCCTGGCCCGCAATGAACCTGACCCCCTAGAGAAA | |
| | CCCAACCGGCCCGACACGGCCTTCGTCTGGTTCCTCAACCCTCTC | |
| | AAGTCCATCAAGTACCTCATCTGCACCCGGTACAAGTGGCTCATC | |
| | ATCAAGATCGTGCTGGCGCTGTTGGGGCTGCTCATGTTGGGGCTC | |
| | TTCCTCTACAGCCTCCCTGGCTACATGGTCAAAAAGCTCCTTGGG | |
| | GCA | |
| bGHpA | CTGTGCCTTCTAGTTGCCAGCCATCTGTTGTTTGCCCCTCCCCCG | 108 |
| | TGCCTTCCTTGACCCTGGAAGGTGCCACTCCCACTGTCCTTTCCT | |
| | AATAAAATGAGGAAATTGCATCGCATTGTCTGAGTAGGTGTCATT | |
| | CTATTCTGGGGGGTGGGGTGGGGCAGGACAGCAAGGGGGAGGATT | |
| | GGGAAGACAATAGCAGGCATGCTGGGGATGCGGTGGGCTCTATGG | |
| 3′ITR | AGGAACCCCTAGTGATGGAGTTGGCCACTCCCTCTCTGCGCGCTC | 104 |
| | GCTCGCTCACTGAGGCCGGGCGACCAAAGGTCGCCCGACGCCCGG | |
| | GCTTTGCCCGGGCGGCCTCAGTGAGCGAGCGAGCGCGCAGAGAGG | |
| | GAGTGGCCAA | |

TABLE 3
Anc80L65

| | | SEQ |
|---|---|---|
| | | ID |
| Name | SEQUENCE | NO |
| Anc80L65 | MAADGYLPDWLEDNLSEGIREWWDLKPGAPKPKANQQKODDGRGL | 109 |
| | VLPGYKYLGPFNGLDKGEPVNAADAAALEHDKAYDQQLKAGDNPY | |
| | LRYNHADAEFQERLQEDTSFGGNLGRAVFQAKKRVLEPLGLVEEG | |
| | AKTAPGKKRPVEQSPQEPDSSSGIGKKGQQPARKRLNFGQTGDSE | |
| | SVPDPQPLGEPPAAPSGVGSNTMAAGGGAPMADNNEGADGVGNAS | |
| | GNWHCDSTWLGDRVITTSTRTWALPTYNNHLYKQISSQSGGSTND | |
| | NTYFGYSTPWGYFDFNRFHCHFSPRDWORLINNNWGFRPKKLNFK | |
| | LFNIQVKEVTTNDGTTTIANNLTSTVQVFTDSEYQLPYVLGSAHQ | |
| | GCLPPFPADVFMIPQYGYLTLNNGSQAVGRSSFYCLEYFPSQMLR | |
| | TGNNFQFSYTFEDVPFHSSYAHSQSLDRLMNPLIDQYLYYLSRTQ | |
| | TTSGTAGNRTLQFSQAGPSSMANQAKNWLPGPCYRQQRVSKTTNQ | |
| | NNNSNFAWTGATKYHLNGRDSLVNPGPAMATHKDDEDKFFPMSGV | |
| | LIFGKQGAGNSNVDLDNVMITNEEEIKTTNPVATEEYGTVATNLQ | |
| | SANTAPATGTVNSQGALPGMVWQDRDVYLQGPIWAKIPHTDGHFH | |
| | PSPLMGGFGLKHPPPQILIKNTPVPANPPTTFSPAKFASFITQYS | |
| | TGQVSVEIEWELQKENSKRWNPEIQYTSNYNKSTNVDFAVDTNGV | |
| | YSEPRPIGTRYLTRNL* | |

### Example 5: In Vivo Expression of Full-Length Human Otoferlin Using Two Vectors

[0467] Wildtype or Otof^{-/-} mice (p23±2 days) were administered either vehicle or the AAVAnc80-hOTOF dual hybrid vectors described in Example 4 via intra-cochlear injection. Otoferlin expression in the inner hair cells was examined 1 month post-administration (FIGS. 6A-6C). Robust expression of full-length human otoferlin was observed only in the inner hair cells and not other cochlear cells in Otof^{-/-} mice administered AAVAnc80-hOTOF dual hybrid vectors (FIG. 6C).

[0468] Non-human primates (NHP) were administered either vehicle or the flag-tagged AAVAnc80-hOTOF dual hybrid vectors described in Example 4 via intra-cochlear injection. Otoferlin expression in the inner hair cells was examined 1 month post-administration (FIGS. 7A-7B). Otoferlin-Flag was detected only in the inner hair cells and not in other cochlear neural regions or supporting cell regions (FIG. 7B).

[0469] Next, the auditory function of Otof^{-/-} mice administered either vehicle or the AAVAnc80-hOTOF dual hybrid vectors described in Example 4 was assessed. The auditory brainstem response (ABR) was assessed 15, 30, 45, and 60 days (FIG. 8A) or 1, 2, 3, 4.5, or 6 months (FIG. 8B) post-administration. Otof/mice administered vehicle had no measurable auditory brainstem response (FIGS. 8A-8B). Approximately 70% of Otof^{-/-} mice administered the AAVAnc80-hOTOF dual hybrid vectors showed restoration of the auditory brainstem response by day 15 (FIG. 8A). At least 80% of Otof−/− administered AAVAnc80-Otoferlin dual hybrid vectors at dose 5× had restored auditory brainstem response through at least 6 months (FIG. 8B). The extent of auditory function restoration was dependent on the dose administered.

### Example 6: In Vivo Biodistribution of Full-Length Human Otoferlin Using Two Vectors

[0470] Non-human primates received bilateral intracochlear administration of either vehicle, the flag-tagged AAVAnc80-hOTOF dual hybrid vectors described in Example 4, or spike-in positive control (OTOF transduced HEK293FT cell lysate added to NHP tissue lysate) and biodistribution of Otoferlin in the mandibular lymph node, liver, and spleen were assessed 1 month post-administration (FIGS. 9A-9C). Only the liver and spleen were positive for human Otoferlin-Flag mRNA expression by RT-qPCR and only in a proportion of animals (FIGS. 9A-9C). No human Otoferlin-Flag protein was detected in the liver or spleen by Western blotting (FIGS. 9D-9E).

### Example 7: In Vivo Cochlear Hair Cell Survival and Function after Administration of Full-Length Human Otoferlin Using Two Vectors

[0471] Cochlear hair cell survival was quantified to assess local tolerability of intracochlear administration of either vehicle or the flag-tagged AAVAnc80-hOTOF dual hybrid vectors described in Example 4 to non-human primates (NHP) (FIGS. 10A-10C) or Otof mice (FIGS. 10D-10F). AAVAnc80-Otof was systemically and locally well tolerated and no adverse effects were observed in clinical pathology, otic pathlogy, systemtic histopathology, and/or auditory functions (FIGS. 10A-10F).

[0472] Auditory and cochlear function were evaluated pre and 6 months post-intracochlear administration of either vehicle or the flag-tagged AAVAnc80-hOTOF dual hybrid vectors described in Example 4 to non-human primates (NHP) (FIGS. 11A-11B). The auditory brainstem response (ABR) was used to measure auditory function and distortion product optoacoustic emissions (DPOAEs) was used to measure cochlear function. No impact of Otoferlin expression or dose was observed within-ear shifts (pre-vs. post-administration) in ABR or DPOAE thresholds.

### Other Aspects

[0473] It is to be understood that the words which have been used are words of description rather than limitation, and that changes may be made within the purview of the appended claims without departing from the true scope and spirit of the disclosure in its broader aspects.

[0474] While the present disclosure has been described at some length and with some particularity with respect to the several described aspects, it is not intended that it should be limited to any such particulars or aspects or any particular aspect, but it is to be construed with references to the appended claims so as to provide the broadest possible interpretation of such claims in view of the prior art and, therefore, to effectively encompass the intended scope of the disclosure.

[0475] It is to be understood that while the disclosure has been described in conjunction with the detailed description thereof, the foregoing description is intended to illustrate and not limit the scope of the disclosure, which is defined by the scope of the appended claims. Other aspects, advantages, and modifications are within the scope of the following claims.

[0476] All publications, patent applications, patents, and other references mentioned herein are incorporated by reference in their entirety. In case of conflict, the present specification, including definitions, will control. In addition, section headings, the materials, methods, and examples are illustrative only and not intended to be limiting.

1. A composition comprising:
a) a first recombinant adeno-associated viral (rAAV) vector genome (vg) comprising a first expression cassette comprising a promoter operably linked to nucleic acid sequence comprising a 5′ portion of an otoferlin gene, wherein the expression cassette is flanked by inverted terminal repeats (ITRs); and
b) a second rAAV vector genome comprising a second expression cassette comprising a nucleic acid sequence comprising a 3′ portion of an otoferlin gene, wherein the expression cassette is flanked by ITRs;
wherein the composition comprises about 4.1E10-4.1E12 total vg or about 8.1E10-8.1E12 total vg.

2.-199. (canceled)

200. The composition of claim 1, wherein the composition comprises about 4.5E11-4.5E13 total vg/mL or about 9E11-9E13 total vg/mL.

201. The composition of claim 1, wherein the composition comprises about 4.5E12 total vg/mL or about 9E12 total vg/mL.

202. The composition of claim 1, wherein the composition comprises the first rAAV vector genome and the second rAAV vector genome in about a 1:1 ratio.

203. The composition of claim 1, wherein the nucleic acid sequence comprising the 5′ portion of the otoferlin gene encodes the portion of an otoferlin protein that is encoded by SEQ ID NO: 101; and wherein the nucleic acid sequence comprising the 3′ portion of the otoferlin gene encodes the portion of an otoferlin protein that is encoded by SEQ ID NO: 107.

204. The composition of claim 1, wherein the promoter is a CAG promoter.

205. A composition comprising:
a) a first rAAV vector genome comprising a first expression cassette comprising a promoter, a first coding sequence that encodes an N-terminal portion of an otoferlin protein positioned 3′ of the promoter, and a splicing donor signal sequence positioned at the 3′ end of the first coding sequence; and
b) a second rAAV vector genome comprising a second expression cassette comprising a splicing acceptor signal sequence, a second coding sequence that encodes a C-terminal portion of an otoferlin protein positioned at the 3′ end of the splicing acceptor signal sequence, and a polyadenylation sequence at 3′ end of the second coding sequence;
wherein the composition is formulated for intra-cochlear administration and comprises monopotassium phosphate, sodium phosphate dibasic, potassium chloride, sodium chloride, and Poloxamer 188.

206. The composition of claim 205, wherein the formulation comprises:
a) about 1.35-1.65 mM monopotassium phosphate;
b) about 7.29-8.91 mM sodium phosphate dibasic;
c) about 2.43-2.97 mM potassium chloride;
d) about 154.8-189.2 mM sodium chloride; and
e) about 0.0001%-0.01% Poloxamer 188.

207. The composition of claim 206, wherein the formulation comprises:
a) about 1.5 mM monopotassium phosphate;
b) about 8.1 mM sodium phosphate dibasic;
c) about 2.7 mM potassium chloride;
d) about 172 mM sodium chloride; and
e) about 0.001% Poloxamer 188.

208. The composition of claim 205, wherein the composition comprises about 4.5E11-4.5E13 total vg/mL or about 9E11-9E13 total vg/mL.

209. The composition of claim 208, wherein the composition comprises about 4.5E12 total vg/mL or about 9E12 total vg/mL.

210. The composition of claim 205, wherein the first rAAV vector and second rAAV vector each comprises a recombinogenic sequence.

211. The composition of claim 205, wherein the polyadenylation sequence is selected from a bovine growth hormone, human growth hormone, mouse-β-globin, mouse-α-globin, polyomavirus, SV40, or synthetic polyadenylation sequence.

212. The composition of claim 205, wherein each of the first and second expression cassettes is flanked by inverted terminal repeats (ITRs), and wherein the ITRs are selected from any one of AAV1, AAV2, AAV3, AAV4, AAV5, AAV6, AAV7, AAV8, AAV9, AAVrh8, AAVrh10, AAVrh39, AAVrh43, o Anc80 ITRs.

213. The composition of claim 212, wherein the first and second rAAV vector genomes are each encapsulated by an AAV capsid.

214. The composition of claim 213, wherein the AAV capsid is a serotype selected from any one of AAV1, AAV2, AAV3, AAV4, AAV5, AAV6, AAV7, AAV8, AAV9, AAVrh8, AAVrh10, AAVrh39, AAVrh43, or Anc80.

215. The composition of claim 214, wherein the AAV capsid comprises the polypeptide sequence of SEQ ID NO: 109.

216. A method of expressing a recombinant full-length otoferlin protein in a mammalian cell, the method comprising administering the composition of claim 205 to the mammalian cell, wherein the first and second rAAV vector genomes are capable of constituting a messenger RNA encoding a full length human otoferlin protein in the mammalian cell.

217. The method of claim 216, wherein the mammalian cell is an inner ear hair cell.

218. A method of treating hearing loss in a subject having a defective otoferlin gene, the method comprising administering the composition claim 1 to the cochlea of the subject, wherein the first and second rAAV vector genomes are capable of constituting a messenger RNA encoding a full length human otoferlin protein in the subject.

219. The method of claim 218, wherein the subject is a human.

220. The method of claim 218, wherein the composition is administered in a single dose.

221. The method of claim 220, wherein the single dose comprises about 0.01-0.2 mL.

222. The method of claim 220, wherein the single dose comprises about 0.09 mL.

223. The method of claim 218, wherein about 4.1E10-4.1E12 total vg, or about 8.1E10-8.1E12 total vg, is administered to the cochlea of the subject.

224. The method of claim 218, wherein about 4.1E11 total vg or about 8.1E11 total vg is administered per cochlea.

225. A kit comprising the composition of claim 1 pre-loaded into a device or a vial.

226. The kit of claim 225, wherein the device comprises a microcatheter.

227. The kit of claim 226, wherein the microcatheter is shaped such that it can enter the middle ear cavity and contact the round window membrane (RWM).

228. The kit of claim 225, further comprising a second vial comprising a diluent.

The application's sequence listing, which the Patent Office published only in electronic form, follows.

SEQUENCE LISTING (110 sequences)

SEQ ID NO: 1 - protein, 1997 aa, Homo sapiens
MALLIHLKTVSELRGRGDRIAKVTFRGQSFYSRVLENCEDVADFDETFRWPVASSIDRNEMLEIQVFNYSKVFSNKLIGTFRMVLQKVVEESHVEVTDTLIDDNNAIIKTSLCVEVRYQATDGTVGSWDDGDFLGDESLQEEEKDSQETDGLLPGSRPSSRPPGEKSFRRAGRSVFSAMKLGKNRSHKEEPQRPDEPAVLEMEDLDHLAIRLGDGLDPDSVSLASVTALTTNVSNKRSKPDIKMEPSAGRPMDYQVSITVIEARQLVGLNMDPVVCVEVGDDKKYTSMKESTNCPYYNEYFVFDFHVSPDVMFDKIIKISVIHSKNLLRSGTLVGSFKMDVGTVYSQPEHQFHHKWAILSDPDDISSGLKGYVKCDVAVVGKGDNIKTPHKANETDEDDIEGNLLLPEGVPPERQWARFYVKIYRAEGLPRMNTSLMANVKKAFIGENKDLVDPYVQVFFAGQKGKTSVQKSSYEPLWNEQVVFTDLFPPLCKRMKVQIRDSDKVNDVAIGTHFIDLRKISNDGDKGFLPTLGPAWVNMYGSTRNYTLLDEHQDLNEGLGEGVSFRARLLLGLAVEIVDTSNPELTSSTEVQVEQATPISESCAGKMEEFFLFGAFLEASMIDRRNGDKPITFEVTIGNYGNEVDGLSRPQRPRPRKEPGDEEEVDLIQNASDDEAGDAGDLASVSSTPPMRPQVTDRNYFHLPYLERKPCIYIKSWWPDQRRRLYNANIMDHIADKLEEGLNDIQEMIKTEKSYPERRLRGVLEELSCGCCRFLSLADKDQGHSSRTRLDRERLKSCMRELENMGQQARMLRAQVKRHTVRDKLRLCQNFLQKLRFLADEPQHSIPDIFIWMMSNNKRVAYARVPSKDLLFSIVEEETGKDCAKVKTLFLKLPGKRGFGSAGWTVQAKVELYLWLGLSKQRKEFLCGLPCGFQEVKAAQGLGLHAFPPVSLVYTKKQAFQLRAHMYQARSLFAADSSGLSDPFARVFFINQSQCTEVLNETLCPTWDQMLVFDNLELYGEAHELRDDPPIIVIEIYDQDSMGKADFMGRTFAKPLVKMADEAYCPPRFPPQLEYYQIYRGNATAGDLLAAFELLQIGPAGKADLPPINGPVDVDRGPIMPVPMGIRPVLSKYRVEVLFWGLRDLKRVNLAQVDRPRVDIECAGKGVQSSLIHNYKKNPNFNTLVKWFEVDLPENELLHPPLNIRVVDCRAFGRYTLVGSHAVSSLRRFIYRPPDRSAPSWNTTVRLLRRCRVLCNGGSSSHSTGEVVVTMEPEVPIKKLETMVKLDATSEAVVKVDVAEEEKEKKKKKKGTAEEPEEEEPDESMLDWWSKYFASIDTMKEQLRQQEPSGIDLEEKEEVDNTEGLKGSMKGKEKARAAKEEKKKKTQSSGSGQGSEAPEKKKPKIDELKVYPKELESEFDNFEDWLHTFNLLRGKTGDDEDGSTEEERIVGRFKGSLCVYKVPLPEDVSREAGYDSTYGMFQGIPSNDPINVLVRVYVVRATDLHPADINGKADPYIAIRLGKTDIRDKENYISKQLNPVFGKSFDIEASFPMESMLTVAVYDWDLVGTDDLIGETKIDLENRFYSKHRATCGIAQTYSTHGYNIWRDPMKPSQILTRLCKDGKVDGPHFGPPGRVKVANRVFTGPSEIEDENGQRKPTDEHVALLALRHWEDIPRAGCRLVPEHVETRPLLNPDKPGIEQGRLELWVDMFPMDMPAPGTPLDISPRKPKKYELRVIIWNTDEVVLEDDDFFTGEKSSDIFVRGWLKGQQEDKQDTDVHYHSLTGEGNFNWRYLFPFDYLAAEEKIVISKKESMFSWDETEYKIPARLTLQIWDADHFSADDFLGAIELDLNRFPRGAKTAKQCTMEMATGEVDVPLVSIFKQKRVKGWWPLLARNENDEFELTGKVEAELHLLTAEEAEKNPVGLARNEPDPLEKPNRPDTSFIWFLNPLKSARYFLWHTYRWLLLKLLLLLLLLLLLALFLYSVPGYLVKKILGA

SEQ ID NO: 2 - protein, 1230 aa, Homo sapiens
MIKTEKSYPERRLRGVLEELSCGCCRFLSLADKDQGHSSRTRLDRERLKSCMRELENMGQQARMLRAQVKRHTVRDKLRLCQNFLQKLRFLADEPQHSIPDIFIWMMSNNKRVAYARVPSKDLLFSIVEEETGKDCAKVKTLFLKLPGKRGFGSAGWTVQAKVELYLWLGLSKQRKEFLCGLPCGFQEVKAAQGLGLHAFPPVSLVYTKKQAFQLRAHMYQARSLFAADSSGLSDPFARVFFINQSQCTEVLNETLCPTWDQMLVFDNLELYGEAHELRDDPPIIVIEIYDQDSMGKADFMGRTFAKPLVKMADEAYCPPRFPPQLEYYQIYRGNATAGDLLAAFELLQIGPAGKADLPPINGPVDVDRGPIMPVPMGIRPVLSKYRVEVLFWGLRDLKRVNLAQVDRPRVDIECAGKGVQSSLIHNYKKNPNFNTLVKWFEVDLPENELLHPPLNIRVVDCRAFGRYTLVGSHAVSSLRRFIYRPPDRSAPSWNTTGEVVVTMEPEVPIKKLETMVKLDATSEAVVKVDVAEEEKEKKKKKKGTAEEPEEEEPDESMLDWWSKYFASIDTMKEQLRQQEPSGIDLEEKEEVDNTEGLKGSMKGKEKARAAKEEKKKKTQSSGSGQGSEAPEKKKPKIDELKVYPKELESEFDNFEDWLHTFNLLRGKTGDDEDGSTEEERIVGRFKGSLCVYKVPLPEDVSREAGYDSTYGMFQGIPSNDPINVLVRVYVVRATDLHPADINGKADPYIAIRLGKTDIRDKENYISKQLNPVFGKSFDIEASFPMESMLTVAVYDWDLVGTDDLIGETKIDLENRFYSKHRATCGIAQTYSTHGYNIWRDPMKPSQILTRLCKDGKVDGPHFGPPGRVKVANRVFTGPSEIEDENGQRKPTDEHVALLALRHWEDIPRAGCRLVPEHVETRPLLNPDKPGIEQGRLELWVDMFPMDMPAPGTPLDISPRKPKKYELRVIIWNTDEVVLEDDDFFTGEKSSDIFVRGWLKGQQEDKQDTDVHYHSLTGEGNFNWRYLFPFDYLAAEEKIVISKKESMFSWDETEYKIPARLTLQIWDADHFSADDFLGAIELDLNRFPRGAKTAKQCTMEMATGEVDVPLVSIFKQKRVKGWWPLLARNENDEFELTGKVEAELHLLTAEEAEKNPVGLARNEPDPLEKPNRPDTAFVWFLNPLKSIKYLICTRYKWLIIKIVLALLGLLMLGLFLYSLPGYMVKKLLGA

SEQ ID NO: 3 - protein, 1307 aa, Homo sapiens
MMTDTQDGPSESSQIMRSLTPLINREEAFGEAGEAGLWPSITHTPDSQEEGLNDIQEMIKTEKSYPERRLRGVLEELSCGCCRFLSLADKDQGHSSRTRLDRERLKSCMRELENMGQQARMLRAQVKRHTVRDKLRLCQNFLQKLRFLADEPQHSIPDIFIWMMSNNKRVAYARVPSKDLLFSIVEEETGKDCAKVKTLFLKLPGKRGFGSAGWTVQAKVELYLWLGLSKQRKEFLCGLPCGFQEVKAAQGLGLHAFPPVSLVYTKKQAFQLRAHMYQARSLFAADSSGLSDPFARVFFINQSQCTEVLNETLCPTWDQMLVFDNLELYGEAHELRDDPPIIVIEIYDQDSMGKADFMGRTFAKPLVKMADEAYCPPRFPPQLEYYQIYRGNATAGDLLAAFELLQIGPAGKADLPPINGPVDVDRGPIMPVPMGIRPVLSKYRVEVLFWGLRDLKRVNLAQVDRPRVDIECAGKGVQSSLIHNYKKNPNFNTLVKWFEVDLPENELLHPPLNIRVVDCRAFGRYTLVGSHAVSSLRRFIYRPPDRSAPSWNTTVRLLRRCRVLCNGGSSSHSTGEVVVTMEPEVPIKKLETMVKLDATSEAVVKVDVAEEEKEKKKKKKGTAEEPEEEEPDESMLDWWSKYFASIDTMKEQLRQQEPSGIDLEEKEEVDNTEGLKGSMKGKEKARAAKEEKKKKTQSSGSGQGSEAPEKKKPKIDELKVYPKELESEFDNFEDWLHTFNLLRGKTGDDEDGSTEEERIVGRFKGSLCVYKVPLPEDVSREAGYDSTYGMFQGIPSNDPINVLVRVYVVRATDLHPADINGKADPYIAIRLGKTDIRDKENYISKQLNPVFGKSFDIEASFPMESMLTVAVYDWDLVGTDDLIGETKIDLENRFYSKHRATCGIAQTYSTHGYNIWRDPMKPSQILTRLCKDGKVDGPHFGPPGRVKVANRVFTGPSEIEDENGQRKPTDEHVALLALRHWEDIPRAGCRLVPEHVETRPLLNPDKPGIEQGRLELWVDMFPMDMPAPGTPLDISPRKPKKYELRVIIWNTDEVVLEDDDFFTGEKSSDIFVRGWLKGQQEDKQDTDVHYHSLTGEGNFNWRYLFPFDYLAAEEKIVISKKESMFSWDETEYKIPARLTLQIWDADHFSADDFLGAIELDLNRFPRGAKTAKQCTMEMATGEVDVPLVSIFKQKRVKGWWPLLARNENDEFELTGKVEAELHLLTAEEAEKNPVGLARNEPDPLEKPNRPDTSFIWFLNPLKSARYFLWHTYRWLLLKLLLLLLLLLLLALFLYSVPGYLVKKILGA

SEQ ID NO: 4 - protein, 1230 aa, Homo sapiens
MIKTEKSYPERRLRGVLEELSCGCCRFLSLADKDQGHSSRTRLDRERLKSCMRELENMGQQARMLRAQVKRHTVRDKLRLCQNFLQKLRFLADEPQHSIPDIFIWMMSNNKRVAYARVPSKDLLFSIVEEETGKDCAKVKTLFLKLPGKRGFGSAGWTVQAKVELYLWLGLSKQRKEFLCGLPCGFQEVKAAQGLGLHAFPPVSLVYTKKQAFQLRAHMYQARSLFAADSSGLSDPFARVFFINQSQCTEVLNETLCPTWDQMLVFDNLELYGEAHELRDDPPIIVIEIYDQDSMGKADFMGRTFAKPLVKMADEAYCPPRFPPQLEYYQIYRGNATAGDLLAAFELLQIGPAGKADLPPINGPVDVDRGPIMPVPMGIRPVLSKYRVEVLFWGLRDLKRVNLAQVDRPRVDIECAGKGVQSSLIHNYKKNPNFNTLVKWFEVDLPENELLHPPLNIRVVDCRAFGRYTLVGSHAVSSLRRFIYRPPDRSAPSWNTTGEVVVTMEPEVPIKKLETMVKLDATSEAVVKVDVAEEEKEKKKKKKGTAEEPEEEEPDESMLDWWSKYFASIDTMKEQLRQQEPSGIDLEEKEEVDNTEGLKGSMKGKEKARAAKEEKKKKTQSSGSGQGSEAPEKKKPKIDELKVYPKELESEFDNFEDWLHTFNLLRGKTGDDEDGSTEEERIVGRFKGSLCVYKVPLPEDVSREAGYDSTYGMFQGIPSNDPINVLVRVYVVRATDLHPADINGKADPYIAIRLGKTDIRDKENYISKQLNPVFGKSFDIEASFPMESMLTVAVYDWDLVGTDDLIGETKIDLENRFYSKHRATCGIAQTYSTHGYNIWRDPMKPSQILTRLCKDGKVDGPHFGPPGRVKVANRVFTGPSEIEDENGQRKPTDEHVALLALRHWEDIPRAGCRLVPEHVETRPLLNPDKPGIEQGRLELWVDMFPMDMPAPGTPLDISPRKPKKYELRVIIWNTDEVVLEDDDFFTGEKSSDIFVRGWLKGQQEDKQDTDVHYHSLTGEGNFNWRYLFPFDYLAAEEKIVISKKESMFSWDETEYKIPARLTLQIWDADHFSADDFLGAIELDLNRFPRGAKTAKQCTMEMATGEVDVPLVSIFKQKRVKGWWPLLARNENDEFELTGKVEAELHLLTAEEAEKNPVGLARNEPDPLEKPNRPDTSFIWFLNPLKSARYFLWHTYRWLLLKLLLLLLLLLLLALFLYSVPGYLVKKILGA

SEQ ID NO: 5 - protein, 1997 aa, Homo sapiens
MALLIHLKTVSELRGRGDRIAKVTFRGQSFYSRVLENCEDVADFDETFRWPVASSIDRNEMLEIQVFNYSKVFSNKLIGTFRMVLQKVVEESHVEVTDTLIDDNNAIIKTSLCVEVRYQATDGTVGSWDDGDFLGDESLQEEEKDSQETDGLLPGSRPSSRPPGEKSFRRAGRSVFSAMKLGKNRSHKEEPQRPDEPAVLEMEDLDHLAIRLGDGLDPDSVSLASVTALTTNVSNKRSKPDIKMEPSAGRPMDYQVSITVIEARQLVGLNMDPVVCVEVGDDKKYTSMKESTNCPYYNEYFVFDFHVSPDVMFDKIIKISVIHSKNLLRSGTLVGSFKMDVGTVYSQPEHQFHHKWAILSDPDDISSGLKGYVKCDVAVVGKGDNIKTPHKANETDEDDIEGNLLLPEGVPPERQWARFYVKIYRAEGLPRMNTSLMANVKKAFIGENKDLVDPYVQVFFAGQKGKTSVQKSSYEPLWNEQVVFTDLFPPLCKRMKVQIRDSDKVNDVAIGTHFIDLRKISNDGDKGFLPTLGPAWVNMYGSTRNYTLLDEHQDLNEGLGEGVSFRARLLLGLAVEIVDTSNPELTSSTEVQVEQATPISESCAGKMEEFFLFGAFLEASMIDRRNGDKPITFEVTIGNYGNEVDGLSRPQRPRPRKEPGDEEEVDLIQNASDDEAGDAGDLASVSSTPPMRPQVTDRNYFHLPYLERKPCIYIKSWWPDQRRRLYNANIMDHIADKLEEGLNDIQEMIKTEKSYPERRLRGVLEELSCGCCRFLSLADKDQGHSSRTRLDRERLKSCMRELENMGQQARMLRAQVKRHTVRDKLRLCQNFLQKLRFLADEPQHSIPDIFIWMMSNNKRVAYARVPSKDLLFSIVEEETGKDCAKVKTLFLKLPGKRGFGSAGWTVQAKVELYLWLGLSKQRKEFLCGLPCGFQEVKAAQGLGLHAFPPVSLVYTKKQAFQLRAHMYQARSLFAADSSGLSDPFARVFFINQSQCTEVLNETLCPTWDQMLVFDNLELYGEAHELRDDPPIIVIEIYDQDSMGKADFMGRTFAKPLVKMADEAYCPPRFPPQLEYYQIYRGNATAGDLLAAFELLQIGPAGKADLPPINGPVDVDRGPIMPVPMGIRPVLSKYRVEVLFWGLRDLKRVNLAQVDRPRVDIECAGKGVQSSLIHNYKKNPNFNTLVKWFEVDLPENELLHPPLNIRVVDCRAFGRYTLVGSHAVSSLRRFIYRPPDRSAPSWNTTVRLLRRCRVLCNGGSSSHSTGEVVVTMEPEVPIKKLETMVKLDATSEAVVKVDVAEEEKEKKKKKKGTAEEPEEEEPDESMLDWWSKYFASIDTMKEQLRQQEPSGIDLEEKEEVDNTEGLKGSMKGKEKARAAKEEKKKKTQSSGSGQGSEAPEKKKPKIDELKVYPKELESEFDNFEDWLHTFNLLRGKTGDDEDGSTEEERIVGRFKGSLCVYKVPLPEDVSREAGYDSTYGMFQGIPSNDPINVLVRVYVVRATDLHPADINGKADPYIAIRLGKTDIRDKENYISKQLNPVFGKSFDIEASFPMESMLTVAVYDWDLVGTDDLIGETKIDLENRFYSKHRATCGIAQTYSTHGYNIWRDPMKPSQILTRLCKDGKVDGPHFGPPGRVKVANRVFTGPSEIEDENGQRKPTDEHVALLALRHWEDIPRAGCRLVPEHVETRPLLNPDKPGIEQGRLELWVDMFPMDMPAPGTPLDISPRKPKKYELRVIIWNTDEVVLEDDDFFTGEKSSDIFVRGWLKGQQEDKQDTDVHYHSLTGEGNFNWRYLFPFDYLAAEEKIVISKKESMFSWDETEYKIPARLTLQIWDADHFSADDFLGAIELDLNRFPRGAKTAKQCTMEMATGEVDVPLVSIFKQKRVKGWWPLLARNENDEFELTGKVEAELHLLTAEEAEKNPVGLARNEPDPLEKPNRPDTAFVWFLNPLKSIKYLICTRYKWLIIKIVLALLGLLMLGLFLYSLPGYMVKKLLGA

SEQ ID NO: 6 - DNA, 4970 bp, Homo sapiens
  source 1..4970: mol_type = other DNA
ccgtgagttctgcccaggccctgtgagctcaccagagccacagactcacagcccagaggtggcttcttccttcaggaactgaagaacccccatgaacaccaacatctccaggttctgagaacagaacctgggaaattgatgacttcctcatgatgaccgatactcaggatggccctagcgagagctcccagatcatgaggaagaaggcctgaacgacatacaggagatgatcaaaacggagaagtcctaccctgagcgtcgcctgcggggcgtcctggaggagctgagctgtggctgctgccgcttcctctccctcgctgacaaggaccagggccactcatcccgcaccaggcttgaccgggagcgcctcaagtcctgcatgagggagctggaaaacatggggcagcaggccaggatgctgcgggcccaggtgaagcggcacacggtgcgggacaagctgaggctgtgccagaacttcctgcagaagctgcgcttcctggcggacgagccccagcacagcattcccgacatcttcatctggatgatgagcaacaacaagcgtgtcgcctatgcccgtgtgccctccaaggacctgctcttctccatcgtggaggaggagactggcaaggactgcgccaaggtcaagacgctcttccttaagctgccagggaagcggggcttcggctcggcaggctggacagtgcaggccaaggtggagctgtacctgtggctgggcctcagcaaacagcgcaaggagttcctgtgcggcctgccctgtggcttccaggaggtcaaggcagcccagggcctgggcctgcatgccttcccacccgtcagcctggtctacaccaagaagcaggcgttccagctccgagcgcacatgtaccaggcccgcagcctctttgccgccgacagcagcggactctcagacccctttgcccgcgtcttcttcatcaatcagagtcagtgcacagaggtgctgaatgagaccctgtgtcccacctgggaccagatgctggtgttcgacaacctggagctctatggtgaagctcatgagctgagggacgatccgcccatcattgtcattgaaatctatgaccaggattccatgggcaaagctgacttcatgggccggaccttcgccaaacccctggtgaagatggcagacgaggcgtactgcccaccccgcttcccacctcagctcgagtactaccagatctaccgtggcaacgccacagctggagacccgctggcggccttcgagctgctgcagattggaccagcagggaaggctgacctgccccccatcaatggcccggtggacgtggaccgaggtcccatcatgcccgtgcccatgggcatccggcccgtgctcagcaagtaccgagtggaggtgctgttctggggcctacgggacctaaagcgggtgaacctggcccaggtggaccggccacgggtggacatcgagtgtgcagggaagggggtgcagtcgtccctgatccacaattataagaagaaccccaacttcaacaccctcgtcaagtggtttgaagtggacctcccagagaacgagctgctgcacccgcccttgaacatccgtgtggtggactgccgggccttcggtcgctacacactggtgggctcccatgccgtcagctccctgcgacgcttcatctaccggcccccagaccgctcggcccccagctggaacaccacgggggaggttgtggtgactatggagccagaggtacccatcaagaaactggagaccatggtgaagctggacgcgacttctgaagctgttgtcaaggtggatgtggctgaggaggagaaggagaagaagaagaagaagaagggcactgcggaggagccagaggaggaggagccagacgagagcatgctggactggtggtccaagtactttgcctccattgacaccatgaaggagcaacttcgacaacaagagccctctggaattgacttggaggagaaggaggaagtggacaataccgagggcctgaaggggtcaatgaagggcaaggagaaggcaagggctgccaaagaggagaagaagaagaaaactcagagctctggctctggccaggggtccgaggcccccgagaagaagaaacccaagattgatgagcttaaggtataccccaaagagctggagtccgagtttgataactttgaggactggctgcacactttcaacttgcttcggggcaagaccggggatgatgaggatggctccaccgaggaggagcgcattgtgggacgcttcaagggctccctctgcgtgtacaaagtgccactcccagaggacgtgtcccgggaagccggctacgactccacctacggcatgttccagggcatcccgagcaatgaccccatcaatgtgctggtccgagtctatgtggtccgggccacggacctgcaccctgctgacatcaacggcaaagctgacccctacatcgccatccggctaggcaagactgacatccgcgacaaggagaactacatctccaagcagctcaaccctgtctttgggaagtcctttgacatcgaggcctccttccccatggaatccatgctgacggtggctgtgtatgactgggacctggtgggcactgatgacctcattggggaaaccaagatcgacctggagaaccgcttctacagcaagcaccgcgccacctgcggcatcgcccagacctactccacacatggctacaatatctggcgggaccccatgaagcccagccagatcctgacccgcctctgcaaagacggcaaagtggacggcccccactttgggccccctgggagagtgaaggtggccaaccgcgtcttcactgggccctctgagattgaggacgagaacggtcagaggaagcccacagacgagcatgtggcgctgttggccctgaggcactgggaggacatcccccgcgcaggctgccgcctggtgccagagcatgtggagacgaggccgctgctcaaccccgacaagccgggcatcgagcagggccgcctggagctgtgggtggacatgttccccatggacatgccagcccctgggacgcctctggacatctcacctcggaagcccaagaagtacgagctgcgggtcatcatctggaacacagatgaggtggtcttggaggacgacgacttcttcacaggggagaagtccagtgacatcttcgtgagggggtggctgaagggccagcaggaggacaagcaggacacagacgtccactaccactccctcactggcgagggcaacttcaactggcgctacctgttccccttcgactacctggcggcggaggagaagatcgtcatctccaagaaggagtccatgttctcctgggacgagaccgagtacaagatccccgcgcggctcaccctgcagatctgggatgcggaccacttctccgctgacgacttcctgggggccatcgagctggacctgaaccggttcccgcggggcgcaaagacagccaagcagtgcaccatggagatggccaccggggaggtggacgtgcccctcgtgtccatcttcaagcaaaagcgcgtcaaaggctggtggcccctcctggcccgcaatgagaacgatgagtttgagctcacgggcaaggtggaggctgagctgcatttactgacagcagaggaggcagagaagaacccagtgggcctggcccgcaatgaacctgaccccctagagaaacccaaccggcccgacacgagcttcatctggttcctgaaccctctcaagtcggctcgctacttcttgtggcacacgtatcgctggctgctcctcaaactgttgctgctcctgctgctgctcctcctcctcgccctgttcctctactctgtgcctggctacctggtcaagaaaatcctcggggcctgagcccagtggcctcctggccggcccgacacggccttcgtctggttcctcaaccctctcaagtccatcaagtacctcatctgcacccggtacaagtggctcatcatcaagatcgtgctggcgctgttggggctgctcatgttggggctcttcctctacagcctccctggctacatggtcaaaaagctccttggggcatgaaggccgccagctcccgccagccgctccccagccctgccgcatttcctttcagtggcttggactctttcccatctcccctggggagcctgaggagcccagcgtccacttttcatgccttgggccgagcctgcctcctgcttgcgggggccgcctgtcctcactgccccaggctgcggcttgcccagtcccgcccctctgacccctgcctgtgggctggggagccttggatggggtggggacctggaatgggtctttcttgccccacctggctgaggcgccacccttcttcaggcccaggctccagaggaagactcctgaaaccctccccaggttttccaagtacaggattgaagctttagtgaaattaaccaaggaccatgggtcagtgcccagggctttaaaaagaatgaacgagcaaaaggtatccccgccgtgacccctgcagatagcaccggtatttgatccgcagcaggggccagaccctgcccacaagtcccagcgcggatgtttctgccactgctgggctccacttggctcctctcacttcccagggggtcgcctgtcctgcctgtgggtttccatggcttcccagagttccctctgccccagccagcgcctccaggcccagctgaggagctgtgagaagcagcagaggggactccccatcccgggcacaccctgtcttcccacccctgcccccttgcccttccagccctttcagctgcaggtgggagctggcccgtcaagtgctgcccctgcctgtgtctgggtttctgttggctgtttttcttttcttggagtggtgatttttctctaaataaaagaagtcaagcactgaaaaaaaaaaaaaaaa

SEQ ID NO: 7 - DNA, 7171 bp, Homo sapiens
  source 1..7171: mol_type = other DNA
atcggaggggggtcgggaggaggaggaggaggcagcggcagagaagagagaggcgtgtgagccgtgctccaccggctagctccttcccgctgctcctgcctggcagtgccaggcagcccacaccagcatggccttgctcatccacctcaagacagtctcggagctgcggggcaggggcgaccggatcgccaaagtgactttccgagggcaatccttctactctcgggtcctggagaactgtgaggatgtggctgactttgatgagacatttcggtggccggtggccagcagcatcgacagaaatgagatgctggagattcaggttttcaactacagcaaagtcttcagcaacaagctcatcgggaccttccgcatggtgctgcagaaggtggtagaggagagccatgtggaggtgactgacacgctgattgatgacaacaatgctatcatcaagaccagcctgtgcgtggaggtccggtatcaggccactgacggcacagtgggctcctgggacgatggggacttcctgggagatgagtctcttcaagaggaagagaaggacagccaagagacggatggactgctcccaggctcccggcccagctcccggcccccaggagagaagagcttccggagagccgggaggagcgtgttctccgccatgaagctcggcaaaaaccggtctcacaaggaggagccccaaagaccagatgaaccggcggtgctggagatggaagaccttgaccatctggccattcggctaggagatggactggatcccgactcggtgtctctagcctcagtcacagctctcaccactaatgtctccaacaagcgatctaagccagacattaagatggagccaagtgctgggcggcccatggattaccaggtcagcatcacggtgatcgaggcccggcagctggtgggcttgaacatggaccctgtggtgtgcgtggaggtgggtgacgacaagaagtacacatccatgaaggagtccactaactgcccctattacaacgagtacttcgtcttcgacttccatgtctctccggatgtcatgtttgacaagatcatcaagatttcggtgattcactccaagaacctgctgcgcagtggcaccctggtgggctccttcaaaatggacgtgggaaccgtgtactcgcagccagagcaccagttccatcacaagtgggccatcctgtctgaccccgatgacatctcctcggggctgaagggctacgtgaagtgtgacgttgccgtggtgggcaaaggggacaacatcaagacgccccacaaggccaatgagaccgacgaagatgacattgaggggaacttgctgctccccgagggggtgccccccgaacgccagtgggcccggttctatgtgaaaatttaccgagcagaggggctgccccgtatgaacacaagcctcatggccaatgtaaagaaggctttcatcggtgaaaacaaggacctcgtggacccctacgtgcaagtcttctttgctggccagaagggcaagacttcagtgcagaagagcagctatgagcccctgtggaatgagcaggtcgtctttacagacctcttccccccactctgcaaacgcatgaaggtgcagatccgagactcggacaaggtcaacgacgtggccatcggcacccacttcattgacctgcgcaagatttctaatgacggagacaaaggcttcctgcccacactgggcccagcctgggtgaacatgtacggctccacacgtaactacacgctgctggatgagcatcaggacctgaacgagggcctgggggagggtgtgtccttccgggcccggctcctgctgggcctggctgtggagatcgtagacacctccaaccctgagctcaccagctccacagaggtgcaggtggagcaggccacgcccatctcggagagctgtgcaggtaaaatggaagaattctttctctttggagccttcctggaggcctcaatgatcgaccggagaaacggagacaagcccatcacctttgaggtcaccataggcaactatgggaacgaagttgatggcctgtcccggccccagcggcctcggccccggaaggagccgggggatgaggaagaagtagacctgattcagaacgcaagtgatgacgaggccggtgatgccggggacctggcctcagtctcctccactccaccaatgcggccccaggtcaccgacaggaactacttccatctgccctacctggagcgaaagccctgcatctacatcaagagctggtggccggaccagcgccgccgcctctacaatgccaacatcatggaccacattgccgacaagctggaagaaggcctgaacgacatacaggagatgatcaaaacggagaagtcctaccctgagcgtcgcctgcggggcgtcctggaggagctgagctgtggctgctgccgcttcctctccctcgctgacaaggaccagggccactcatcccgcaccaggcttgaccgggagcgcctcaagtcctgcatgagggagctggaaaacatggggcagcaggccaggatgctgcgggcccaggtgaagcggcacacggtgcgggacaagctgaggctgtgccagaacttcctgcagaagctgcgcttcctggcggacgagccccagcacagcattcccgacatcttcatctggatgatgagcaacaacaagcgtgtcgcctatgcccgtgtgccctccaaggacctgctcttctccatcgtggaggaggagactggcaaggactgcgccaaggtcaagacgctcttccttaagctgccagggaagcggggcttcggctcggcaggctggacagtgcaggccaaggtggagctgtacctgtggctgggcctcagcaaacagcgcaaggagttcctgtgcggcctgccctgtggcttccaggaggtcaaggcagcccagggcctgggcctgcatgccttcccacccgtcagcctggtctacaccaagaagcaggcgttccagctccgagcgcacatgtaccaggcccgcagcctctttgccgccgacagcagcggactctcagacccctttgcccgcgtcttcttcatcaatcagagtcagtgcacagaggtgctgaatgagaccctgtgtcccacctgggaccagatgctggtgttcgacaacctggagctctatggtgaagctcatgagctgagggacgatccgcccatcattgtcattgaaatctatgaccaggattccatgggcaaagctgacttcatgggccggaccttcgccaaacccctggtgaagatggcagacgaggcgtactgcccaccccgcttcccacctcagctcgagtactaccagatctaccgtggcaacgccacagctggagacctgctggcggccttcgagctgctgcagattggaccagcagggaaggctgacctgccccccatcaatggcccggtggacgtggaccgaggtcccatcatgcccgtgcccatgggcatccggcccgtgctcagcaagtaccgagtggaggtgctgttctggggcctacgggacctaaagcgggtgaacctggcccaggtggaccggccacgggtggacatcgagtgtgcagggaagggggtgcagtcgtccctgatccacaattataagaagaaccccaacttcaacaccctcgtcaagtggtttgaagtggacctcccagagaacgagctgctgcacccgcccttgaacatccgtgtggtggactgccgggccttcggtcgctacacactggtgggctcccatgccgtcagctccctgcgacgcttcatctaccggcccccagaccgctcggcccccagctggaacaccacggtcaggcttctccggcgctgccgtgtgctgtgcaatgggggctcctcctctcactccacaggggaggttgtggtgactatggagccagaggtacccatcaagaaactggagaccatggtgaagctggacgcgacttctgaagctgttgtcaaggtggatgtggctgaggaggagaaggagaagaagaagaagaagaagggcactgcggaggagccagaggaggaggagccagacgagagcatgctggactggtggtccaagtactttgcctccattgacaccatgaaggagcaacttcgacaacaagagccctctggaattgacttggaggagaaggaggaagtggacaataccgagggcctgaaggggtcaatgaagggcaaggagaaggcaagggctgccaaagaggagaagaagaagaaaactcagagctctggctctggccaggggtccgaggcccccgagaagaagaaacccaagattgatgagcttaaggtataccccaaagagctggagtccgagtttgataactttgaggactggctgcacactttcaacttgcttcggggcaagaccggggatgatgaggatggctccaccgaggaggagcgcattgtgggacgcttcaagggctccctctgcgtgtacaaagtgccactcccagaggacgtgtcccgggaagccggctacgactccacctacggcatgttccagggcatcccgagcaatgaccccatcaatgtgctggtccgagtctatgtggtccgggccacggacctgcaccctgctgacatcaacggcaaagctgacccctacatcgccatccggctaggcaagactgacatccgcgacaaggagaactacatctccaagcagctcaaccctgtctttgggaagtcctttgacatcgaggcctccttccccatggaatccatgctgacggtggctgtgtatgactgggacctggtgggcactgatgacctcattggggaaaccaagatcgacctggagaaccgcttctacagcaagcaccgcgccacctgcggcatcgcccagacctactccacacatggctacaatatctggcgggaccccatgaagcccagccagatcctgacccgcctctgcaaagacggcaaagtggacggcccccactttgggccccctgggagagtgaaggtggccaaccgcgtcttcactgggccctctgagattgaggacgagaacggtcagaggaagcccacagacgagcatgtggcgctgttggccctgaggcactgggaggacatcccccgcgcaggctgccgcctggtgccagagcatgtggagacgaggccgctgctcaaccccgacaagccgggcatcgagcagggccgcctggagctgtgggtggacatgttccccatggacatgccagcccctgggacgcctctggacatctcacctcggaagcccaagaagtacgagctgcgggtcatcatctggaacacagatgaggtggtcttggaggacgacgacttcttcacaggggagaagtccagtgacatcttcgtgagggggtggctgaagggccagcaggaggacaagcaggacacagacgtccactaccactccctcactggcgagggcaacttcaactggcgctacctgttccccttcgactacctggcggcggaggagaagatcgtcatctccaagaaggagtccatgttctcctgggacgagaccgagtacaagatccccgcgcggctcaccctgcagatctgggatgcggaccacttctccgctgacgacttcctgggggccatcgagctggacctgaaccggttcccgcggggcgcaaagacagccaagcagtgcaccatggagatggccaccggggaggtggacgtgcccctcgtgtccatcttcaagcaaaagcgcgtcaaaggctggtggcccctcctggcccgcaatgagaacgatgagtttgagctcacgggcaaggtggaggctgagctgcatttactgacagcagaggaggcagagaagaacccagtgggcctggcccgcaatgaacctgaccccctagagaaacccaaccggcccgacacgagcttcatctggttcctgaaccctctcaagtcggctcgctacttcttgtggcacacgtatcgctggctgctcctcaaactgttgctgctcctgctgctgctcctcctcctcgccctgttcctctactctgtgcctggctacctggtcaagaaaatcctcggggcctgagcccagtggcctcctggccggcccgacacggccttcgtctggttcctcaaccctctcaagtccatcaagtacctcatctgcacccggtacaagtggctcatcatcaagatcgtgctggcgctgttggggctgctcatgttggggctcttcctctacagcctccctggctacatggtcaaaaagctccttggggcatgaaggccgccagctcccgccagccgctccccagccctgccgcatttcctttcagtggcttggactctttcccatctcccctggggagcctgaggagcccagcgtccactcttcatgccttgggccgagcctgcctcctgcttgcgggggccgcctgtcctcactgccccaggctgcggcttgcccagtcccgcccctctgacccctgcctgtgggctggggagccttggatggggtggggacctggaatgggtctctcttgccccacctggctgaggcgccacccttcttcaggcccaggctccagaggaagactcctgaaaccctccccaggtcttccaagtacaggattgaagctttagtgaaattaaccaaggaccatgggtcagtgcccagggctttaaaaagaatgaacgagcaaaaggtatccccgccgtgacccctgcagatagcaccggtctttgatccgcagcaggggccagaccctgcccacaagtcccagcgcggctgcttctgccactgctgggctccacttggctcctctcacttcccagggggtcgcctgtcctgcctgtgggtttccatggcttcccagagctccctctgccccagccagcgcctccaggcccagctgaggagctgtgagaagcagcagaggggactccccatcccgggcacaccctgtcctcccacccctgcccccttgcccttccagccctttcagctgcagctgggagctggcccgtcaagtgctgcccctgcctgtgtctgggtttctgttggctgtttttcttttcttgagtggtgatttttctctaaataaaagaagtcaagcactgaaaaaaaaaaaaaaaa

SEQ ID NO: 8 - DNA, 4969 bp, Homo sapiens
  source 1..4969: mol_type = other DNA
ccgtgagttctgcccaggccctgtgagctcaccagagccacagactcacagcccagaggtggcttcttccttcaggaactgaagaacccccatgaacaccaacatctccaggttctgagaacagaacctgggaaattgatgacttcctcatgatgaccgatactcaggatggccctagcgagagctcccagatcatgaggaagaaggcctgaacgacatacaggagatgatcaaaacggagaagtcctaccctgagcgtcgcctgcggggcgtcctggaggagctgagctgtggctgctgccgcttcctctccctcgctgacaaggaccagggccactcatcccgcaccaggcttgaccgggagcgcctcaagtcctgcatgagggagctggaaaacatggggcagcaggccaggatgctgcgggcccaggtgaagcggcacacggtgcgggacaagctgaggctgtgccagaacttcctgcagaagctgcgcttcctggcggacgagccccagcacagcattcccgacatcttcatctggatgatgagcaacaacaagcgtgtcgcctatgcccgtgtgccctccaaggacctgctcttctccatcgtggaggaggagactggcaaggactgcgccaaggtcaagacgctcttccttaagctgccagggaagcggggcttcggctcggcaggctggacagtgcaggccaaggtggagctgtacctgtggctgggcctcagcaaacagcgcaaggagttcctgtgcggcctgccctgtggcttccaggaggtcaaggcagcccagggcctgggcctgcatgccttcccacccgtcagcctggtctacaccaagaagcaggcgttccagctccgagcgcacatgtaccaggcccgcagcctctttgccgccgacagcagcggactctcagacccctttgcccgcgtcttcttcatcaatcagagtcagtgcacagaggtgctgaatgagaccctgtgtcccacctgggaccagatgctggtgttcgacaacctggagctctatggtgaagctcatgagctgagggacgatccgcccatcattgtcattgaaatctatgaccaggattccatgggcaaagctgacttcatgggccggaccttcgccaaacccctggtgaagatggcagacgaggcgtactgcccaccccgcttcccacctcagctcgagtactaccagatctaccgtggcaacgccacagctggagacctgctggcggccttcgagctgctgcagattggaccagcagggaaggctgacctgccccccatcaatggcccggtggacgtggaccgaggtcccatcatgcccgtgcccatgggcatccggcccgtgctcagcaagtaccgagtggaggtgctgttctggggcctacgggacctaaagcgggtgaacctggcccaggtggaccggccacgggtggacatcgagtgtgcagggaagggggtgcagtcgtccctgatccacaattataagaagaaccccaacttcaacaccctcgtcaagtggtttgaagtggacctcccagagaacgagctgctgcacccgcccttgaacatccgtgtggtggactgccgggccttcggtcgctacacactggtgggctcccatgccgtcagctccctgcgacgcttcatctaccggcccccagaccgctcggcccccagctggaacaccacgggggaggttgtggtgactatggagccagaggtacccatcaagaaactggagaccatggtgaagctggacgcgacttctgaagctgttgtcaaggtggatgtggctgaggaggagaaggagaagaagaagaagaagaagggcactgcggaggagccagaggaggaggagccagacgagagcatgctggactggtggtccaagtactttgcctccattgacaccatgaaggagcaacttcgacaacaagagccctctggaattgacttggaggagaaggaggaagtggacaataccgagggcctgaaggggtcaatgaagggcaaggagaaggcaagggctgccaaagaggagaagaagaagaaaactcagagctctggctctggccaggggtccgaggcccccgagaagaagaaacccaagattgatgagcttaaggtataccccaaagagctggagtccgagtttgataactttgaggactggctgcacactttcaacttgcttcggggcaagaccggggatgatgaggatggctccaccgaggaggagcgcattgtgggacgcttcaagggctccctctgcgtgtacaaagtgccactcccagaggacgtgtcccgggaagccggctacgactccacctacggcatgttccagggcatcccgagcaatgaccccatcaatgtgctggtccgagtctatgtggtccgggccacggacctgcaccctgctgacatcaacggcaaagctgacccctacatcgccatccggctaggcaagactgacatccgcgacaaggagaactacatctccaagcagctcaaccctgtctttgggaagtcctttgacatcgaggcctccttccccatggaatccatgctgacggtggctgtgtatgactgggacctggtgggcactgatgacctcattggggaaaccaagatcgacctggagaaccgcttctacagcaagcaccgcgccacctgcggcatcgcccagacctactccacacatggctacaatatctggcgggaccccatgaagcccagccagatcctgacccgcctctgcaaagacggcaaagtggacggcccccactttgggccccctgggagagtgaaggtggccaaccgcgtcttcactgggccctctgagattgaggacgagaacggtcagaggaagcccacagacgagcatgtggcgctgttggccctgaggcactgggaggacatcccccgcgcaggctgccgcctggtgccagagcatgtggagacgaggccgctgctcaaccccgacaagccgggcatcgagcagggccgcctggagctgtgggtggacatgttccccatggacatgccagcccctgggacgcctctggacatctcacctcggaagcccaagaagtacgagctgcgggtcatcatctggaacacagatgaggtggtcttggaggacgacgacttcttcacaggggagaagtccagtgacatcttcgtgagggggtggctgaagggccagcaggaggacaagcaggacacagacgtccactaccactccctcactggcgagggcaacttcaactggcgctacctgttccccttcgactacctggcggcggaggagaagatcgtcatctccaagaaggagtccatgttctcctgggacgagaccgagtacaagatccccgcgcggctcaccctgcagatctgggatgcggaccacttctccgctgacgacttcctgggggccatcgagctggacctgaaccggttcccgcggggcgcaaagacagccaagcagtgcaccatggagatggccaccggggaggtggacgtgcccctcgtgtccatcttcaagcaaaagcgcgtcaaaggctggtggcccctcctggcccgcaatgagaacgatgagtttgagctcacgggcaaggtggaggctgagctgcatttactgacagcagaggaggcagagaagaacccagtgggcctggcccgcaatgaacctgaccccctagagaaacccaaccggcccgacacgagcttcatctggttcctgaaccctctcaagtcggctcgctacttcttgtggcacacgtatcgctggctgctcctcaaactgttgctgctcctgctgctgctcctcctcctcgccctgttcctctactctgtgcctggctacctggtcaagaaaatcctcggggcctgagcccagtggcctcctggccggcccgacacggccttcgtctggttcctcaaccctctcaagtccatcaagtacctcatctgcacccggtacaagtggctcatcatcaagatcgtgctggcgctgttggggctgctcatgttggggctcttcctctacagcctccctggctacatggtcaaaaagctccttggggcatgaaggccgccagctcccgccagccgctccccagccctgccgcatttcctttcagtggcttggactctttcccatctcccctggggagcctgaggagcccagcgtccactcttcatgccttgggccgagcctgcctcctgcttgcgggggccgcctgtcctcactgccccaggctgcggcttgcccagtcccgcccctctgacccctgcctgtgggctggggagccttggatggggtggggacctggaatgggtctctcttgccccacctggctgaggcgccacccttcttcaggcccaggctccagaggaagactcctgaaaccctccccaggtcttccaagtacaggattgaagctttagtgaaattaaccaaggaccatgggtcagtgcccagggctttaaaaagaatgaacgagcaaaaggtatccccgccgtgacccctgcagatagcaccggtctttgatccgcagcaggggccagaccctgcccacaagtcccagcgcggctgcttctgccactgctgggctccacttggctcctctcacttcccagggggtcgcctgtcctgcctgtgggtttccatggcttcccagagctccctctgccccagccagcgcctccaggcccagctgaggagctgtgagaagcagcagaggggactccccatcccgggcacaccctgtcctcccacccctgcccccttgcccttccagccctttcagctgcagctgggagctggcccgtcaagtgctgcccctgcctgtgtctgggtttctgttggctgtttttcttttcttgagtggtgatttttctctaaataaaagaagtcaagcactgaaaaaaaaaaaaaaaa

SEQ ID NO: 9 - DNA, 5123 bp, Homo sapiens
  source 1..5123: mol_type = other DNA
ccgtgagttctgcccaggccctgtgagctcaccagagccacagactcacagcccagaggtggcttcttccttcaggaactgaagaacccccatgaacaccaacatctccaggttctgagaacagaacctgggaaattgatgacttcctcatgatgaccgatactcaggatggccctagcgagagctcccagatcatgaggtccctcactcccctgatcaacagggaggaggcatttggggaggctggggaggcggggctgtggcccagcatcacccacactcctgattcacaggaagaaggcctgaacgacatacaggagatgatcaaaacggagaagtcctaccctgagcgtcgcctgcggggcgtcctggaggagctgagctgtggctgctgccgcttcctctccctcgctgacaaggaccagggccactcatcccgcaccaggcttgaccgggagcgcctcaagtcctgcatgagggagctggaaaacatggggcagcaggccaggatgctgcgggcccaggtgaagcggcacacggtgcgggacaagctgaggctgtgccagaacttcctgcagaagctgcgcttcctggcggacgagccccagcacagcattcccgacatcttcatctggatgatgagcaacaacaagcgtgtcgcctatgcccgtgtgccctccaaggacctgctcttctccatcgtggaggaggagactggcaaggactgcgccaaggtcaagacgctcttccttaagctgccagggaagcggggcttcggctcggcaggctggacagtgcaggccaaggtggagctgtacctgtggctgggcctcagcaaacagcgcaaggagttcctgtgcggcctgccctgtggcttccaggaggtcaaggcagcccagggcctgggcctgcatgccttcccacccgtcagcctggtctacaccaagaagcaggcgttccagctccgagcgcacatgtaccaggcccgcagcctctttgccgccgacagcagcggactctcagacccctttgcccgcgtcttcttcatcaatcagagtcagtgcacagaggtgctgaatgagaccctgtgtcccacctgggaccagatgctggtgttcgacaacctggagctctatggtgaagctcatgagctgagggacgatccgcccatcattgtcattgaaatctatgaccaggattccatgggcaaagctgacttcatgggccggaccttcgccaaacccctggtgaagatggcagacgaggcgtactgcccaccccgcttcccacctcagctcgagtactaccagatctaccgtggcaacgccacagctggagacctgctggcggccttcgagctgctgcagattggaccagcagggaaggctgacctgccccccatcaatggcccggtggacgtggaccgaggtcccatcatgcccgtgcccatgggcatccggcccgtgctcagcaagtaccgagtggaggtgctgttctggggcctacgggacctaaagcgggtgaacctggcccaggtggaccggccacgggtggacatcgagtgtgcagggaagggggtgcagtcgtccctgatccacaattataagaagaaccccaacttcaacaccctcgtcaagtggtttgaagtggacctcccagagaacgagctgctgcacccgcccttgaacatccgtgtggtggactgccgggccttcggtcgctacacactggtgggctcccatgccgtcagctccctgcgacgcttcatctaccggcccccagaccgctcggcccccagctggaacaccacggtcaggcttctccggcgctgccgtgtgctgtgcaatgggggctcctcctctcactccacaggggaggttgtggtgactatggagccagaggtacccatcaagaaactggagaccatggtgaagctggacgcgacttctgaagctgttgtcaaggtggatgtggctgaggaggagaaggagaagaagaagaagaagaagggcactgcggaggagccagaggaggaggagccagacgagagcatgctggactggtggtccaagtactttgcctccattgacaccatgaaggagcaacttcgacaacaagagccctctggaattgacttggaggagaaggaggaagtggacaataccgagggcctgaaggggtcaatgaagggcaaggagaaggcaagggctgccaaagaggagaagaagaagaaaactcagagctctggctctggccaggggtccgaggcccccgagaagaagaaacccaagattgatgagcttaaggtataccccaaagagctggagtccgagtttgataactttgaggactggctgcacactttcaacttgcttcggggcaagaccggggatgatgaggatggctccaccgaggaggagcgcattgtgggacgcttcaagggctccctctgcgtgtacaaagtgccactcccagaggacgtgtcccgggaagccggctacgactccacctacggcatgttccagggcatcccgagcaatgaccccatcaatgtgctggtccgagtctatgtggtccgggccacggacctgcaccctgctgacatcaacggcaaagctgacccctacatcgccatccggctaggcaagactgacatccgcgacaaggagaactacatctccaagcagctcaaccctgtctttgggaagtcctttgacatcgaggcctccttccccatggaatccatgctgacggtggctgtgtatgactgggacctggtgggcactgatgacctcattggggaaaccaagatcgacctggagaaccgcttctacagcaagcaccgcgccacctgcggcatcgcccagacctactccacacatggctacaatatctggcgggaccccatgaagcccagccagatcctgacccgcctctgcaaagacggcaaagtggacggcccccactttgggccccctgggagagtgaaggtggccaaccgcgtcttcactgggccctctgagattgaggacgagaacggtcagaggaagcccacagacgagcatgtggcgctgttggccctgaggcactgggaggacatcccccgcgcaggctgccgcctggtgccagagcatgtggagacgaggccgctgctcaaccccgacaagccgggcatcgagcagggccgcctggagctgtgggtggacatgttccccatggacatgccagcccctgggacgcctctggacatctcacctcggaagcccaagaagtacgagctgcgggtcatcatctggaacacagatgaggtggtcttggaggacgacgacttcttcacaggggagaagtccagtgacatcttcgtgagggggtggctgaagggccagcaggaggacaagcaggacacagacgtccactaccactccctcactggcgagggcaacttcaactggcgctacctgttccccttcgactacctggcggcggaggagaagatcgtcatctccaagaaggagtccatgttctcctgggacgagaccgagtacaagatccccgcgcggctcaccctgcagatctgggatgcggaccacttctccgctgacgacttcctgggggccatcgagctggacctgaaccggttcccgcggggcgcaaagacagccaagcagtgcaccatggagatggccaccggggaggtggacgtgcccctcgtgtccatcttcaagcaaaagcgcgtcaaaggctggtggcccctcctggcccgcaatgagaacgatgagtttgagctcacgggcaaggtggaggctgagctgcatttactgacagcagaggaggcagagaagaacccagtgggcctggcccgcaatgaacctgaccccctagagaaacccaaccggcccgacacgagcttcatctggttcctgaaccctctcaagtcggctcgctacttcttgtggcacacgtatcgctggctgctcctcaaactgttgctgctcctgctgctgctcctcctcctcgccctgttcctctactctgtgcctggctacctggtcaagaaaatcctcggggcctgagcccagtggcctcctggccggcccgacacggccttcgtctggttcctcaaccctctcaagtccatcaagtacctcatctgcacccggtacaagtggctcatcatcaagatcgtgctggcgctgttggggctgctcatgttggggctcttcctctacagcctccctggctacatggtcaaaaagctccttggggcatgaaggccgccagctcccgccagccgctccccagccctgccgcatttcctttcagtggcttggactctttcccatctcccctggggagcctgaggagcccagcgtccactcttcatgccttgggccgagcctgcctcctgcttgcgggggccgcctgtcctcactgccccaggctgcggcttgcccagtcccgcccctctgacccctgcctgtgggctggggagccttggatggggtggggacctggaatgggtctctcttgccccacctggctgaggcgccacccttcttcaggcccaggctccagaggaagactcctgaaaccctccccaggtcttccaagtacaggattgaagctttagtgaaattaaccaaggaccatgggtcagtgcccagggctttaaaaagaatgaacgagcaaaaggtatccccgccgtgacccctgcagatagcaccggtctttgatccgcagcaggggccagaccctgcccacaagtcccagcgcggctgcttctgccactgctgggctccacttggctcctctcacttcccagggggtcgcctgtcctgcctgtgggtttccatggcttcccagagctccctctgccccagccagcgcctccaggcccagctgaggagctgtgagaagcagcagaggggactccccatcccgggcacaccctgtcctcccacccctgcccccttgcccttccagccctttcagctgcagctgggagctggcccgtcaagtgctgcccctgcctgtgtctgggtttctgttggctgtttttcttttcttgagtggtgatttttctctaaataaaagaagtcaagcactgaaaaaaaaaaaaaaaa

SEQ ID NO: 10 - DNA, 4771 bp, Homo sapiens
  source 1..4771: mol_type = other DNA
ccgtgagttctgcccaggccctgtgagctcaccagagccacagactcacagcccagaggtggcttcttccttcaggaactgaagaacccccatgaacaccaacatctccaggttctgagaacagaacctgggaaattgatgacttcctcatgatgaccgatactcaggatggccctagcgagagctcccagatcatgaggaagaaggcctgaacgacatacaggagatgatcaaaacggagaagtcctaccctgagcgtcgcctgcggggcgtcctggaggagctgagctgtggctgctgccgcttcctctccctcgctgacaaggaccagggccactcatcccgcaccaggcttgaccgggagcgcctcaagtcctgcatgagggagctggaaaacatggggcagcaggccaggatgctgcgggcccaggtgaagcggcacacggtgcgggacaagctgaggctgtgccagaacttcctgcagaagctgcgcttcctggcggacgagccccagcacagcattcccgacatcttcatctggatgatgagcaacaacaagcgtgtcgcctatgcccgtgtgccctccaaggacctgctcttctccatcgtggaggaggagactggcaaggactgcgccaaggtcaagacgctcttccttaagctgccagggaagcggggcttcggctcggcaggctggacagtgcaggccaaggtggagctgtacctgtggctgggcctcagcaaacagcgcaaggagttcctgtgcggcctgccctgtggcttccaggaggtcaaggcagcccagggcctgggcctgcatgccttcccacccgtcagcctggtctacaccaagaagcaggcgttccagctccgagcgcacatgtaccaggcccgcagcctctttgccgccgacagcagcggactctcagacccctttgcccgcgtcttcttcatcaatcagagtcagtgcacagaggtgctgaatgagaccctgtgtcccacctgggaccagatgctggtgttcgacaacctggagctctatggtgaagctcatgagctgagggacgatccgcccatcattgtcattgaaatctatgaccaggattccatgggcaaagctgacttcatgggccggaccttcgccaaacccctggtgaagatggcagacgaggcgtactgcccaccccgcttcccacctcagctcgagtactaccagatctaccgtggcaacgccacagctggagacctgctggcggccttcgagctgctgcagattggaccagcagggaaggctgacctgccccccatcaatggcccggtggacgtggaccgaggtcccatcatgcccgtgcccatgggcatccggcccgtgctcagcaagtaccgagtggaggtgctgttctggggcctacgggacctaaagcgggtgaacctggcccaggtggaccggccacgggtggacatcgagtgtgcagggaagggggtgcagtcgtccctgatccacaattataagaagaaccccaacttcaacaccctcgtcaagtggtttgaagtggacctcccagagaacgagctgctgcacccgcccttgaacatccgtgtggtggactgccgggccttcggtcgctacacactggtgggctcccatgccgtcagctccctgcgacgcttcatctaccggcccccagaccgctcggcccccagctggaacaccacgggggaggttgtggtgactatggagccagaggtacccatcaagaaactggagaccatggtgaagctggacgcgacttctgaagctgttgtcaaggtggatgtggctgaggaggagaaggagaagaagaagaagaagaagggcactgcggaggagccagaggaggaggagccagacgagagcatgctggactggtggtccaagtactttgcctccattgacaccatgaaggagcaacttcgacaacaagagccctctggaattgacttggaggagaaggaggaagtggacaataccgagggcctgaaggggtcaatgaagggcaaggagaaggcaagggctgccaaagaggagaagaagaagaaaactcagagctctggctctggccaggggtccgaggcccccgagaagaagaaacccaagattgatgagcttaaggtataccccaaagagctggagtccgagtttgataactttgaggactggctgcacactttcaacttgcttcggggcaagaccggggatgatgaggatggctccaccgaggaggagcgcattgtgggacgcttcaagggctccctctgcgtgtacaaagtgccactcccagaggacgtgtcccgggaagccggctacgactccacctacggcatgttccagggcatcccgagcaatgaccccatcaatgtgctggtccgagtctatgtggtccgggccacggacctgcaccctgctgacatcaacggcaaagctgacccctacatcgccatccggctaggcaagactgacatccgcgacaaggagaactacatctccaagcagctcaaccctgtctttgggaagtcctttgacatcgaggcctccttccccatggaatccatgctgacggtggctgtgtatgactgggacctggtgggcactgatgacctcattggggaaaccaagatcgacctggagaaccgcttctacagcaagcaccgcgccacctgcggcatcgcccagacctactccacacatggctacaatatctggcgggaccccatgaagcccagccagatcctgacccgcctctgcaaagacggcaaagtggacggcccccactttgggccccctgggagagtgaaggtggccaaccgcgtcttcactgggccctctgagattgaggacgagaacggtcagaggaagcccacagacgagcatgtggcgctgttggccctgaggcactgggaggacatcccccgcgcaggctgccgcctggtgccagagcatgtggagacgaggccgctgctcaaccccgacaagccgggcatcgagcagggccgcctggagctgtgggtggacatgttccccatggacatgccagcccctgggacgcctctggacatctcacctcggaagcccaagaagtacgagctgcgggtcatcatctggaacacagatgaggtggtcttggaggacgacgacttcttcacaggggagaagtccagtgacatcttcgtgagggggtggctgaagggccagcaggaggacaagcaggacacagacgtccactaccactccctcactggcgagggcaacttcaactggcgctacctgttccccttcgactacctggcggcggaggagaagatcgtcatctccaagaaggagtccatgttctcctgggacgagaccgagtacaagatccccgcgcggctcaccctgcagatctgggatgcggaccacttctccgctgacgacttcctgggggccatcgagctggacctgaaccggttcccgcggggcgcaaagacagccaagcagtgcaccatggagatggccaccggggaggtggacgtgcccctcgtgtccatcttcaagcaaaagcgcgtcaaaggctggtggcccctcctggcccgcaatgagaacgatgagtttgagctcacgggcaaggtggaggctgagctgcatttactgacagcagaggaggcagagaagaacccagtgggcctggcccgcaatgaacctgaccccctagagaaacccaaccggcccgacacggccttcgtctggttcctcaaccctctcaagtccatcaagtacctcatctgcacccggtacaagtggctcatcatcaagatcgtgctggcgctgttggggctgctcatgttggggctcttcctctacagcctccctggctacatggtcaaaaagctccttggggcatgaaggccgccagctcccgccagccgctccccagccctgccgcatttcctttcagtggcttggactctttcccatctcccctggggagcctgaggagcccagcgtccactcttcatgccttgggccgagcctgcctcctgcttgcgggggccgcctgtcctcactgccccaggctgcggcttgcccagtcccgcccctctgacccctgcctgtgggctggggagccttggatggggtggggacctggaatgggtctctcttgccccacctggctgaggcgccacccttcttcaggcccaggctccagaggaagactcctgaaaccctccccaggtcttccaagtacaggattgaagctttagtgaaattaaccaaggaccatgggtcagtgcccagggctttaaaaagaatgaacgagcaaaaggtatccccgccgtgacccctgcagatagcaccggtctttgatccgcagcaggggccagaccctgcccacaagtcccagcgcggctgcttctgccactgctgggctccacttggctcctctcacttcccagggggtcgcctgtcctgcctgtgggtttccatggcttcccagagctccctctgccccagccagcgcctccaggcccagctgaggagctgtgagaagcagcagaggggactccccatcccgggcacaccctgtcctcccacccctgcccccttgcccttccagccctttcagctgcagctgggagctggcccgtcaagtgctgcccctgcctgtgtctgggtttctgttggctgtttttcttttcttgagtggtgatttttctctaaataaaagaagtcaagcactgaaaaaaaaaaaaaaaa

SEQ ID NO: 11 - DNA, 6973 bp, Homo sapiens
  source 1..6973: mol_type = other DNA
atcggaggggggtcgggaggaggaggaggaggcagcggcagagaagagagaggcgtgtgagccgtgctccaccggctagctccttcccgctgctcctgcctggcagtgccaggcagcccacaccagcatggccttgctcatccacctcaagacagtctcggagctgcggggcaggggcgaccggatcgccaaagtgactttccgagggcaatccttctactctcgggtcctggagaactgtgaggatgtggctgactttgatgagacatttcggtggccggtggccagcagcatcgacagaaatgagatgctggagattcaggttttcaactacagcaaagtcttcagcaacaagctcatcgggaccttccgcatggtgctgcagaaggtggtagaggagagccatgtggaggtgactgacacgctgattgatgacaacaatgctatcatcaagaccagcctgtgcgtggaggtccggtatcaggccactgacggcacagtgggctcctgggacgatggggacttcctgggagatgagtctcttcaagaggaagagaaggacagccaagagacggatggactgctcccaggctcccggcccagctcccggcccccaggagagaagagcttccggagagccgggaggagcgtgttctccgccatgaagctcggcaaaaaccggtctcacaaggaggagccccaaagaccagatgaaccggcggtgctggagatggaagaccttgaccatctggccattcggctaggagatggactggatcccgactcggtgtctctagcctcagtcacagctctcaccactaatgtctccaacaagcgatctaagccagacattaagatggagccaagtgctgggcggcccatggattaccaggtcagcatcacggtgatcgaggcccggcagctggtgggcttgaacatggaccctgtggtgtgcgtggaggtgggtgacgacaagaagtacacatccatgaaggagtccactaactgcccctattacaacgagtacttcgtcttcgacttccatgtctctccggatgtcatgtttgacaagatcatcaagatttcggtgattcactccaagaacctgctgcgcagtggcaccctggtgggctccttcaaaatggacgtgggaaccgtgtactcgcagccagagcaccagttccatcacaagtgggccatcctgtctgaccccgatgacatctcctcggggctgaagggctacgtgaagtgtgacgttgccgtggtgggcaaaggggacaacatcaagacgccccacaaggccaatgagaccgacgaagatgacattgaggggaacttgctgctccccgagggggtgccccccgaacgccagtgggcccggttctatgtgaaaatttaccgagcagaggggctgccccgtatgaacacaagcctcatggccaatgtaaagaaggctttcatcggtgaaaacaaggacctcgtggacccctacgtgcaagtcttctttgctggccagaagggcaagacttcagtgcagaagagcagctatgagcccctgtggaatgagcaggtcgtctttacagacctcttccccccactctgcaaacgcatgaaggtgcagatccgagactcggacaaggtcaacgacgtggccatcggcacccacttcattgacctgcgcaagatttctaatgacggagacaaaggcttcctgcccacactgggcccagcctgggtgaacatgtacggctccacacgtaactacacgctgctggatgagcatcaggacctgaacgagggcctgggggagggtgtgtccttccgggcccggctcctgctgggcctggctgtggagatcgtagacacctccaaccctgagctcaccagctccacagaggtgcaggtggagcaggccacgcccatctcggagagctgtgcaggtaaaatggaagaattctttctctttggagccttcctggaggcctcaatgatcgaccggagaaacggagacaagcccatcacctttgaggtcaccataggcaactatgggaacgaagttgatggcctgtcccggccccagcggcctcggccccggaaggagccgggggatgaggaagaagtagacctgattcagaacgcaagtgatgacgaggccggtgatgccggggacctggcctcagtctcctccactccaccaatgcggccccaggtcaccgacaggaactacttccatctgccctacctggagcgaaagccctgcatctacatcaagagctggtggccggaccagcgccgccgcctctacaatgccaacatcatggaccacattgccgacaagctggaagaaggcctgaacgacatacaggagatgatcaaaacggagaagtcctaccctgagcgtcgcctgcggggcgtcctggaggagctgagctgtggctgctgccgcttcctctccctcgctgacaaggaccagggccactcatcccgcaccaggcttgaccgggagcgcctcaagtcctgcatgagggagctggaaaacatggggcagcaggccaggatgctgcgggcccaggtgaagcggcacacggtgcgggacaagctgaggctgtgccagaacttcctgcagaagctgcgcttcctggcggacgagccccagcacagcattcccgacatcttcatctggatgatgagcaacaacaagcgtgtcgcctatgcccgtgtgccctccaaggacctgctcttctccatcgtggaggaggagactggcaaggactgcgccaaggtcaagacgctcttccttaagctgccagggaagcggggcttcggctcggcaggctggacagtgcaggccaaggtggagctgtacctgtggctgggcctcagcaaacagcgcaaggagttcctgtgcggcctgccctgtggcttccaggaggtcaaggcagcccagggcctgggcctgcatgccttcccacccgtcagcctggtctacaccaagaagcaggcgttccagctccgagcgcacatgtaccaggcccgcagcctctttgccgccgacagcagcggactctcagacccctttgcccgcgtcttcttcatcaatcagagtcagtgcacagaggtgctgaatgagaccctgtgtcccacctgggaccagatgctggtgttcgacaacctggagctctatggtgaagctcatgagctgagggacgatccgcccatcattgtcattgaaatctatgaccaggattccatgggcaaagctgacttcatgggccggaccttcgccaaacccctggtgaagatggcagacgaggcgtactgcccaccccgcttcccacctcagctcgagtactaccagatctaccgtggcaacgccacagctggagacctgctggcggccttcgagctgctgcagattggaccagcagggaaggctgacctgccccccatcaatggcccggtggacgtggaccgaggtcccatcatgcccgtgcccatgggcatccggcccgtgctcagcaagtaccgagtggaggtgctgttctggggcctacgggacctaaagcgggtgaacctggcccaggtggaccggccacgggtggacatcgagtgtgcagggaagggggtgcagtcgtccctgatccacaattataagaagaaccccaacttcaacaccctcgtcaagtggtttgaagtggacctcccagagaacgagctgctgcacccgcccttgaacatccgtgtggtggactgccgggccttcggtcgctacacactggtgggctcccatgccgtcagctccctgcgacgcttcatctaccggcccccagaccgctcggcccccagctggaacaccacggtcaggcttctccggcgctgccgtgtgctgtgcaatgggggctcctcctctcactccacaggggaggttgtggtgactatggagccagaggtacccatcaagaaactggagaccatggtgaagctggacgcgacttctgaagctgttgtcaaggtggatgtggctgaggaggagaaggagaagaagaagaagaagaagggcactgcggaggagccagaggaggaggagccagacgagagcatgctggactggtggtccaagtactttgcctccattgacaccatgaaggagcaacttcgacaacaagagccctctggaattgacttggaggagaaggaggaagtggacaataccgagggcctgaaggggtcaatgaagggcaaggagaaggcaagggctgccaaagaggagaagaagaagaaaactcagagctctggctctggccaggggtccgaggcccccgagaagaagaaacccaagattgatgagcttaaggtataccccaaagagctggagtccgagtttgataactttgaggactggctgcacactttcaacttgcttcggggcaagaccggggatgatgaggatggctccaccgaggaggagcgcattgtgggacgcttcaagggctccctctgcgtgtacaaagtgccactcccagaggacgtgtcccgggaagccggctacgactccacctacggcatgttccagggcatcccgagcaatgaccccatcaatgtgctggtccgagtctatgtggtccgggccacggacctgcaccctgctgacatcaacggcaaagctgacccctacatcgccatccggctaggcaagactgacatccgcgacaaggagaactacatctccaagcagctcaaccctgtctttgggaagtcctttgacatcgaggcctccttccccatggaatccatgctgacggtggctgtgtatgactgggacctggtgggcactgatgacctcattggggaaaccaagatcgacctggagaaccgcttctacagcaagcaccgcgccacctgcggcatcgcccagacctactccacacatggctacaatatctggcgggaccccatgaagcccagccagatcctgacccgcctctgcaaagacggcaaagtggacggcccccactttgggccccctgggagagtgaaggtggccaaccgcgtcttcactgggccctctgagattgaggacgagaacggtcagaggaagcccacagacgagcatgtggcgctgttggccctgaggcactgggaggacatcccccgcgcaggctgccgcctggtgccagagcatgtggagacgaggccgctgctcaaccccgacaagccgggcatcgagcagggccgcctggagctgtgggtggacatgttccccatggacatgccagcccctgggacgcctctggacatctcacctcggaagcccaagaagtacgagctgcgggtcatcatctggaacacagatgaggtggtcttggaggacgacgacttcttcacaggggagaagtccagtgacatcttcgtgagggggtggctgaagggccagcaggaggacaagcaggacacagacgtccactaccactccctcactggcgagggcaacttcaactggcgctacctgttccccttcgactacctggcggcggaggagaagatcgtcatctccaagaaggagtccatgttctcctgggacgagaccgagtacaagatccccgcgcggctcaccctgcagatctgggatgcggaccacttctccgctgacgacttcctgggggccatcgagctggacctgaaccggttcccgcggggcgcaaagacagccaagcagtgcaccatggagatggccaccggggaggtggacgtgcccctcgtgtccatcttcaagcaaaagcgcgtcaaaggctggtggcccctcctggcccgcaatgagaacgatgagtttgagctcacgggcaaggtggaggctgagctgcatttactgacagcagaggaggcagagaagaacccagtgggcctggcccgcaatgaacctgaccccctagagaaacccaaccggcccgacacggccttcgtctggttcctcaaccctctcaagtccatcaagtacctcatctgcacccggtacaagtggctcatcatcaagatcgtgctggcgctgttggggctgctcatgttggggctcttcctctacagcctccctggctacatggtcaaaaagctccttggggcatgaaggccgccagctcccgccagccgctccccagccctgccgcatttcctttcagtggcttggactctttcccatctcccctggggagcctgaggagcccagcgtccactcttcatgccttgggccgagcctgcctcctgcttgcgggggccgcctgtcctcactgccccaggctgcggcttgcccagtcccgcccctctgacccctgcctgtgggctggggagccttggatggggtggggacctggaatgggtctctcttgccccacctggctgaggcgccacccttcttcaggcccaggctccagaggaagactcctgaaaccctccccaggtcttccaagtacaggattgaagctttagtgaaattaaccaaggaccatgggtcagtgcccagggctttaaaaagaatgaacgagcaaaaggtatccccgccgtgacccctgcagatagcaccggtctttgatccgcagcaggggccagaccctgcccacaagtcccagcgcggctgcttctgccactgctgggctccacttggctcctctcacttcccagggggtcgcctgtcctgcctgtgggtttccatggcttcccagagctccctctgccccagccagcgcctccaggcccagctgaggagctgtgagaagcagcagaggggactccccatcccgggcacaccctgtcctcccacccctgcccccttgcccttccagccctttcagctgcagctgggagctggcccgtcaagtgctgcccctgcctgtgtctgggtttctgttggctgtttttcttttcttgagtggtgatttttctctaaataaaagaagtcaagcactgaaaaaaaaaaaaaaaa

SEQ ID NO: 12 - DNA, 108496 bp, Homo sapiens
  source 1..108496: mol_type = other DNA
gggagagcatgcgggctttttcacccatttggagactctgcctgcagaatcctcaagacattcatttcattcattcgttcactctttttttcagacaagggttcttaggatcattcattcattctatacagatttgctgatactgtacaggttgcctctcagaatccagtgcctgttctcagtacctatgctgactggtaggagggataaagacagccttacaccctgggagaggcggtccagagtagaaacatcagacactgtaggagaaagagccaaagaacaggaggcaacagccagacttgcatgttagatggttggagtctgaaaatatccagagtaaagaaaggtaggtgtaacctagtatttgaaagtgctaaacagcaagccagcgctcagggcaagtggccaggaagctttccaagaaaaacttctgggaggataaagggaggtctgtgaaaggaccgaccgcaaagtcgggcgggtactgcacacatgacccattaactacggctcttccggccttgccaggttcttcgagcgggcacccacccggtatccttccctccttcaaccaacaagtactgaccttgcccgaatgctgggtgctggccctgtgcgccggacggaagggcctgattttctcgcattttctctaagcgctggaggctgcccgcctggggcgtctccaagcactaaaccccacgtggctccatctcctcccccttccccggctacatccatgcgaggtcccttatgccctgctggctgtgccccacttgccagggagcgccttcctgtgaaggggaatctggggaggcccccgcccgtgcctgcccacttcctactctgaaaccacaaacctctaggaaggcccctcgccccgtcgggtggaaaattggctcctcggggttccttcaaccccaaagtccgggggcagggggctgaatttcgatcaccgaggagggcgctagtggaagggggaggggaggaggcgctccctcggccttacccgggcatgagtccagggggcacgtaggcggcattgaactcggtcagtagggtgcccgcgctgcgggaggccatggtgggtgcgcgagtacagcgagcctggcgctccgctccgccccacggtaaacagcggcgggtcacctggcaacggccacggcggcgagcctggcaacgccagctggccccgcggtcctcgcgttccgagacactgcgcccccctggcggccacctcccggagcagccccatagggcgcgcccagaaggcgcctcccatttccgcgagctctgctgggtgacccctgtcacttgccccggcgcgtcggggctctctgccttgctgcctgcgggatgtgcagaggctcagatgcgggagggaggcagaacatcgctggagaggcctggcgggatccgtcttgcggtgacccggcttggaacgcgacgctaccacaaaggacaggccaggtcctgactttggaggtcacgcacgaagcagctgccccaccgtggctcaggcccagaaacctgagtggccttagggtccccaggagctatgtctctccaaggcttcccctgcaccccagctccatgggagttccaggaaggggctctgtagtgggccgcgctgggcgaggttgcctaggacgctgtgtgtaattgtgtgtgtgcgtgcgtgcgtgcatgtgtgcgtgtgtgtgtgcgcgccttgcgaagaggagcatttttcatttttcttcttaatctctagctgatggcttccttctcacctcatcatacctgtaaactactccacaagaggcaaaaagaaaatcatagaacgtctgggtgtgtgatttacatttgtccccaatgctgccgttcattttggggatggcatccgcaggggtagcgcttgccccagagagcaggcctgctgaaggcccaccccctgtgtaatcctccctgtgactgcttcagcctccacatttgagtttctccagggacccttacaccagccttggtgcctagggcaggcacagggccttcggcttttccataaggggtgagggtatggggacagcttccacggtgccaggctcttggtgactcgggtggaggccctgccaccccagctccctctgcagcagtcctggtgtcatgaagaagcctggcagttcccactttgtctccaggtcttgcttcttcccttcagatgccggatggagagcagtgctcccctcgcacttcggttctgtaaatggcagtggatgaagaccgcagacgctactgggttcacagaatgtggctgccaccagcattctccaaagacttcccctggcaaatgccaatgaaatgaaggggagccacaggcttcccagaggctcaggaagcagaaacactgaggcctggttggaaagagagctgtaggcaaaggaacggctgcaaacaaactgggtggaaggaaaatccatccatccttcagaatgcagtcatgtctgtatttttctaaattctcattggggaacatgttctacaataaggaaaacatgagtcaaagacccccagccctggtgaggttgaccgcctacttcctcccccattcagggctgcccagccagtcctgctggtaaacccaccaccctgccttccacctgcctgtgttctagtccatctgtctcgtctgattgggatcctgtgccatccatatcatattcatccctgaatctcagcacctggctctggaaagaattcagtaaatgttcattacataaattatatactcagttaccaaaatgggtaacagaagaatggaaattaaaaagtgggttctggctgggaacggtggctcatgcctgtaatcccagcattttggaaggccgaggcaggcggatcacttgaggtcagcagtttgagaccagcctagccaacatggtgaaaccccatctctactaaaaatacaaacattagctgggcatggtagcacatgcttatagtctgacctatttgggaggctgaggcaggagaatcgcttgaacccgggaggcagaggttgcagtgagcctagatcactccactgccctccagcctgggtgacagagtgagactctctctcaaaaaaaaaaaaaaaaaaagagtgggatctgtctcttaggttttcagaaaggccagctgactccattgagagctgctgagtggaattgctaccattttatggatgtggaaagtgagattcagcatagatcaatgccttggctagggcaggatcatgggctttttcctaaagatgcacagggtctataagaggcctcatgaaattcactcctttcaggggaggacctccagagaaccaaggaagaagatattttctgttgttgttgttgtaccttgtagtcaccaagccttaaaaacacagatcacctgatgacctcatggatggaaaatgctagtgaatttaggtgtttttttttttaagacattaaacttatctagcttttgaaaatttagcattcatacttgtattcaataaacagaatactctaagacatttttaaattcaatatgattagataaatgtgagaaaggtaagcaagaattggttaggaaaaagtgcaaaggaaaaaaacgtaagtagaaaaagaaaaatagggcacagtagcaaggaaatatctagaaggaggaaagaaggctcttgggacatactgtaggttatttggaatgcagaattcaaaagaagtaacctcttgttaccatgctgtgaaaaattagtatttctctttttaacctttagactctgtttcaggtagatccctgagctcactcttttatcctttcaacagtaattgggcatcctacggtgcacaggataccatgtggggctctggggtagagggatgctgtgctccagggccctcctgaggtcaggaggggaaaaggcaagggaagcagccccaggactcagtaagatgagaggaggcaggagcagcacagaggaggaccccaacccagctggggtgcgggtacagaggcacctccaggagcaggcactcaagctgagtccagggtggggtggagggcattccaccaagaatgaatagcaagaacaaggctgcagatgaccctgcacagattccagcatcagggattctggcccccagcgtccctttccttggtgtatgctgctggaagacaggagggggcagttctcttttggtccttagaaatttccctatagacatcccttctcctgcccctagcagcttataacagcagaaggccattcaattctgctcctctggctggaaagcaaacatcagcctggcttaccttcgctagcctgcctgacccccagccttggggtggggctaggttagtgccctggatccttaaacatggcccctggtagcacataagcctctgctgcctccacaaccagccatctccatcatgcatggcctggtcctgagcctcccctcaggcagcagccccagcctctctgcttcctgagattcagaaacagggatcccagggcagggctcagggcccagcctcttgggggcacagtctccagcagggaagaggtgggcgtaggtggacaaatacattcccttcttcttgtagtgtgcccctgtgggtgggagtgccccccgccccacatccaccctacctatgctcatgcccactcctctgtgcccactactggtggcagggcttgcttagcagggaagcagcagagccctgcagaggggtgggcagagcctcccttccaggagctgggagaagacacctgaagctggacagagctttatctgggagccggcggctgctgaataatgaattccaactctgccgcactcccaggctgcacattgggtgcacacacacacacacacacacgcacacaccgatacacacacgctgggctgacaacttggaggggcgggggctgtgaggctctgtgagtcgctgcaggagcagcttagctcggcttggttgccttggtctctgtgggcagcatcggaggggggtcgggaggaggaggaggaggcagcggcagagaagagagaggcgtgtgagccgtgctccaccggctagctccttcccgctgctcctgcctggcagtgccaggcagcccacaccagcatggccttgctcatccacctcaagacagtctcggagctgcggggcaggggcgaccggatcgccaaagtgactttccgaggtagggaagccgctgtctcagagggacgccagctctgagagctggaccagcccatgctctggaggtggccggggataggacagggctgggaggatgggtgggaaaagttctagcaggggctggggcgacgagccttttcacaggtagtcatctgcctgggactgactggccattgtgatttctggaaaatcagggtcccctgttcttccatgcctgtgtctccttgtgcttgccaacatgccagttccccgggcagggcacagagccctctgcctggggaggcagaagtgaggaccacatccctgagctcagggagacccaggaccccctccttctctctctctccctctcctgcaggttgatttccttgagcacagggtgggggccgggtatggagcctggggcacccagggtgactgggagaaaccaggcagccagtagctccctgggccccagagtgatgggggacactgttggcttcttttagatctattcatgggcgggaaccccgggagcccctcgcctctcttctgtctggtcttttctcatccttttcactcctgtattcagcgaccatttattatgatctactgtgtcccaaggataggggtagaaacacagagctgagcacaacccagccccagccccaaggagcctgcatctgttgggcaggcgtggaacaagcaggacaggtatgtgagacagaaggtgggggtgcagcatgcaagctacagaagcagcaccctcacccaggctggtgaccggtggtcagggaaggcttcccggaggaagtaacactcagctaatacccgaaggaccagcgggtgggagctaggagaggaggtaaggactgaggaggcagaggaaacagtgtgcccagagctgagagaggagctgaaactctggaactgaaagaggttccatgtgtctacagctcagagagggtgcaggagcggaggccagagagccaagcagggcaaggaggcgaggctggacctgaccccggggacagcggagcccctgagcattttaagtggggaaaggcagggccaggctgactctgtccttcaccacccacctctgcctctccatgtggttgctgcccagccctgagggttgggggtacttctcactagacatggccccttctcccgagagaggggtctgagagtgggatggggacgaggtggtgagaagggggcagagaggacccccctatactaaagagcaaagtgagccttggggcccaggctggacacagtgtctgcacctctgttggaagggatgggagagaccattggcagaacattccagcaagagccctggggcacccacatcacctacccagaggccctgggatgcccacattgcagcttgtgttcatagggacaggcaggggtggaggtgatggcagtggccctgccggcaggcggaggttaggcaggagggagagggaggtgtgggctgggctgccttttgcctcccaccccaacccactgactgctttctctgcagcaccctggatctccctctgtgtgccacctgcaggctcatgctggctttagaaaaagcaaatgtgtcctttcatctgtgaaatgtggccctgagctccacgggcagcatagtgtggggcggttaagctacaggttgccatcctgctgcagctgtgctggaacggtccaggctgcaccggacaggcccacttgcaggccgagaaaccaaggttcaggggtagaacactgcgcgtggcattcacggaggagctgaggcacggtggtcccagctctcaggacctcatcctgagtactcaatcttgcaagctctttatctgctcctgggccacctgggggccagcaccttgtctgacacccatcttctccttggagcagtgaagggctgggcctttagcctcactgaccacacaggaattagtttatttgcaacccttgctctctggactgagtggagaaatcgcttccaagctccacattggcaggaggtggccatgggcagagctcctggggaagggggctgggcagcaggaataggcagatgacaagcagtttccagaaagtacctttattacaacgaaagatgcctcagccgctcacctgtgtcatctagcagttcacagttgtaggcgccccaaaagaccaacactgaccacaattcagagggaatggacccgctctacaatgttccttagcatctcccagcacatgcaaccactgggggccaagcaagtcctctgcagggggaaacaagaaactggtaaacacgcagagggagacactggccccaggctccccaaggcttttgagtgaaagtcaatgccgggggaggtggtgagggagcccttggtgagctgtgcccattggcagtggccctaggtaggccagagcagctggttgaaatatggcttgaccttctgtgctgtgccatccaagacactaaggaaagagccctcctgggctattgtggaaaaagttctggatatggagtcagaagccctagatcctacctgggttctgccactcaccctcagtttcctcatctgtaaaatgggcatgataataacactcacttcactagattgcttcagggaaaccataggtatggaagagtttgtgggaagagtattcaaatggtcgatgtgtttgtgaggcagccattcccattctccttgggagcagctgctggcccctgaggtatcttctctccagaccagcagagggccccatgtgagatataaagggaagaggagagcacgtctaaggggttccagtctgccaggagaaggcagagagcctggactctgctctgtaggagcctctgctgagatgttccgcaggaacccaggcaggcagacccccgagactcctgttctcatctggctgggtgtgcaccagctttgcccgtggccacctcttttcccactgccctcaggccagtcggcccctcggtcagtgctcccagccagttctgtatctagctcttagttcttactgcccctggctgctcctaagctggtgctgccctgttcatgcatttcctgaacatgctaatatttgtgcacaggcctgggaccctgaggtgaaggggccagcctggccctccaggagtcacaatcccattgggtcagacaggagatagggagtcctgggcgaatctctattgtgcctgcaggccacagggctcagctgggtttctcattaacaaaatggagacagtggtcctcatttagctcagaggcctgcagttcccaggagtaatcaagagtgggctatctaagaaggagccatcttgaccacaggttgctactcaaagagaggaagtattagcttcaggtatttcctttatcaactcctgagatagttccctacatcaatcacagagccacagaacgcagggtgtgaagggtcccgaagttcttctagtccaaccttctgtccagtgctgagcaccaaggctgggggacctggactgtaagggaaccaagtgacagacagtccagggccaaccctgatgtctcccttctctttctatcccctgagccttcttgccaagacatgaggtttggggattttctgtgtgagataagaacatctaaaggctggatctggcttccacataattcactgtggctggaaattggcacaaaggtttgcagggcatccccctccaccttttcattcttactcttcttcccaccctccccctgattcccaccctgctatgttcccactacattcaacttccagccattcccaaaagataccacacccttttacacctccaaactttgagacatcgatcatatttcttctgcctggaatgaccaccctccaccttgagaacgcccattaattctgctcatccttcaaggcccagctcatatgctacctcctccatgaaggagtagtactttgcacacaaagtactcctctagcagtactttgcacacattcttcctactgctctgccaaggtacattgcatttcagaaactggccacacctctgcatgctgcccaagcttttgagcatcttcaggacagacatcagacatggtttctgtctttgagggattcactgtgtcatgggtttgagttcttccactgtggcactgtcactctttggctccatttccccaactgtgagctctcaccccagaactttctatccaaggaggatcaagggactggaagaggcctcaagggccaagaaccaagaaccttggctcttactccttccatcaacttccctaacccagagaatcttctagggctccagaggggcctaacgatttttttttttttttttttttttgagtctcgctctgtcgccaggctggagtgcagtgcagtgcgatctcggctcactgcaacctccagctcctgggttcaagcgattcttctgcctcagcctctggagtagctgggactacaggcacacgccaccatgcccgactaatttttgtatttttagtagagacggtgtttcaccatatttcccaggctggtctcaaactcctgacctcatgatccgcctgcctcggcctcccaaagtgctgggattacaggtgtgagccactgcgcccagtcaagcctaacaaatattagcaagttcagctccagcccataggtgggaagcaagagggattgcgtgtgtaagccagagtcagttaggggaagacagaggaaggagaaagggcagacgggaaaggaggtgggagcaggctctgagttggcccccggagctcagaagggaggcgggagtttttattgagcaggggaaatgggcggtatttaagaagccaccgaagggtcttagttcattggcaggatcaaaggccatgaaagggccaggcgtggtggctcatgcctctttccgagccttactgcgaccacacgtggggcaggatctcaccatctgacagaggagaagaaacatacacacagaggtgaaatgagtgcagcatacaggagggccagcggtgggggtaaatagcaacaatgttcagaggatgacagcttacttagagctacagagacgagggaaaaggagcaggaggaggaagtgcctaagctgggtcttgaaaaactgcccctgtttgtacctatggagatgcaggaagtgaggaattggtgatggaggaaggtgaagtctttttgggtgagggaccgaccagaccagaggccagaggaggagaattgcagccaagttccatgtcggggaagccacaccatgtagctggagcagaggctataggaagtagaagagggagaccagctagggagggagcagtgggcctgctgagtgattgtgcagggaagggttgcagctgaggcactggggacaagatgtccccctactgttggctgcaggctccacctctgactccacattacatttattttccccagtaaaatgagggagccctccctcttgatgataaatatagctactatttggaaacttatctgccgcccctggtaaaggaggcagaatacccagtgcacccacccctgaaatgctcctgcaatgcctaggcctgtctgtgggctgtggtccagcctagcaccccctctcttggagaatgtgaggttggcattgtccctgctgaaggcagcaatagaggggacccttacgacgaccttggcagccggtggctggctgtggacacagccctgcgcttttgttttagtcctaacggatatgccccctgcatcctccattcttcacagcacactcagtccccctcaccacacctgagggaaatcttctctgcctaatgccccacgtagtgaatgttctcccctcctccctcccccagagcaagccattgcacaccagcgaagggcagacagagcacacagaaaattccccagacttctgctttgataggaagtgtattttcatgtaatggaaatgattgtaaaactgccttcccctgcaaaagccctcaggaatatgctgctggaaatgtgcttgagaacagacttgcaaatcatttctctgaattgggaagtcttggttatcttagccacttttaccgatcatgtgaaagccacatctctcgcacccactcccatccctgggtctcatttttttcttttttctgtcgcccacgctggagtgcagtggcacaatcatagttcactgcaacctcaacctcctgggttcaagcgatgctcccacctcagcctcccgagtagctaggactacaggcacgcaccaccatgctcagctaatttttgtatttttagtagagatggggtttcaccatattgcccaggctggtcttgaactcccgggctcatgtgagctgcctggctcagcctcccaaagtgctgggattataggcgtaagccactgtgcctggccttttttttttttttttaactttttatatataaaaaaactctcaaatacatacaagagtggggagaacagtatcatggccctatgttgtaccatccaatttcagctaccatcaattcatggccaatcttgcttcatttgcatcccatcctacttcctcaccccaaattattttgaagaagatcccaaaccccataccattccatctgtaaatattcagtacacagttataaaagataagagctcaaataaataccacatactttgtcattttaaagaaattaataacaattccttagtactataaactaatcaggcagtcatcaaattcctaattgtctcatcaatgtcataatttttttccaatttattaaaagcttcattttaatgtgttttgtaaatcaggtatttaatcatttatccactcgttctgttgaagggcagccatgtgccacgcactgggggatggtggggaatgagacagatgtggttcctgtcctcaaagggggaagatgaccactgcacccatcatcatgaggagctttatggaagggaggcacaggtgcccaggcagctcatggtgaggaaacccacttagcccaggatggggggaagccaccccagtgcgtgagccagagtcagttaggggaagactgaggaaggaggaagggcagatgggaagggagggaggagcaggctcctagttggcccctagagcccggaagtgagtcaggagtttttattgagcaggaggaatgggcggtatttaagaagcccttgaagggtcgcagctcattggcaggaacaaaggccatgaaagggctgggcatggtggctcacgcctgtaatcccagcactttgggaggccaaggcgggggggatcatttgagggcaggagtttgagaccagcctggccaacatggtgaaaccacatctctactaaaaacacaaaaattagccgggcgtggtggtgcacgcctataatcccagctactcgggaggctgaggcaggagaatcgcttgaacccaggaggcagaggctgcagtgagccgagattgtgccactgcactccagcctgggcgacagagcgagactctgtctcaagggggggaaaaaagccatgaaaggctccatcccaggcagaggggctaacactagtgcagacgtggtggtgtggagatgcatcaggggagtgtggaggggagaccggaaggcagggcacgggggacgcagccaaacacggagggtctttggtgtcacactcttagcaggagaatgggatgctaagatcttgttttggagagaaggctctagaggtgaggactgcgggcagggacactggggaggaagcccggggcaggcggagggctgagtgcctcagcaggcgccatgagagaggaaggagcggcgctgggatcaggggagtgagtgacagggcagggcaagagtcaattgtggtcctggggaccaccgcggacccagggatttggggtacagggccttagttgattctcatctagacaggtgccagttgctgacaccctgaattctggcaaacatggagacatcagggtggaaacacctggagccactgccatccaggtgggcgccttgagggccaggccccttggctgctttcccagcagcagcatggagcctggcacagaacagacctggcatagaagtgggagcaaggaacaccgcctgtgggtgcaggagcagtgatcagttagcaacaggggcccccctgcagccagccatccaggcagcaccagacagtgatccatttctctcggtgacagttctagaaaaggctccggagacagggactatcatgtgatcatttttaccctagaccgcttgaccgctttctgtctgaactgatccacctgctagacgctgcctcaacagtcctcgtttctattttattttcttttacttcaaagcagaagggctaatctgctgaggtggagacgagttttcacccactggcttttttttttttcagccgaagtttaaggtaaagtcaggactgcagtttccacaatatttttaccctatcggagagtaaaagagtcaccctcccattatacctcattgtattcccagtgcctggcacagaatgggtactctacacacttgtggatcactgggaccacaagctcctctgtcaccgtaacaggggaatctaggacccagcagttgatgactgtgtgggtggcactgtccaaggctcaaagacaaataccacaggcccttcctgcctcagtgccagggtctgaaaaatgggaaccagcgctttcagtcggttgcagggcaaagtcagagtttgagtgaggacctggaagaagggtttgagctgagccagagagatgggatttatcatccctgccctgcccctgcctctcagatgaatccctgacccaagcctaagtttccatagtgtaaacctggatgttagcagggtgggttaaggggaaatacatgagtggaggtagaaatgatattttagtacaatttgtggataataaagggttagagttccatggggcctccatttagctgagaaatggggaaaatggaaggggtaaccttttccagtgggaggcccagggactctgcagtatcccaagtctggctctgtgagtcattggtgattttcagagagtatactatgtaagaaacatgaggaacagctgctttcttggacaactctttgaagtgaatttctttcttctaccatgccatcaactgtcattataaaattgaagatgtgtttctcatggggaaaaaaattgttattacaagagatatgggcaattagacaagtctcaatacatttcaaaagactgaaatcttacagagtatgttctctgaccatagtggaattcagctaaaaatcaataataagaagattatctttgaaagttccaaatatttggaaattaatgcctttcttaacctatggtcaaagaaggaagtaaaagagaaattatgaaacatttttaactgaattataatgaaaatacaacatattaacatttatcattttaagtacttacagcagaaaagaagaaaagtgtaaaattgtaatctaggtttctgccttaaaaagataccaaaagaaaagcaaattaaacccaaatcttgaaaacattatgttaaataaaagaagccagacacaaaagaccacatactgtataacctcatttacagtcaggcatcgcttagtgataggagtacattctgaaaaatgcatcattaagcgattgtgtcattgtgtgaacatcatagagtgtacttacacaaagctagatggtatagccaactacacacctaggctacatggtatgacctactgctcctaggccacaaacgtgtacagaacgtaactgtattcaatgctgtaggcaatcatagtacaatggtaagtatttgtgtatctaaacatagaaaagatacagtaaatacaatattataatcttatgggaccactgttgtatatccaagtggtcgttgaccaaaacggtgttatgtggtgcatgaatgtatacgaaatgctcagaacaggcaaatccatacagagaggagatttgtggttgtcaagggctgtggggagggagaatggggagtgactgctcacgggtatggagtctccttccagggtgatgaaaatattctggaattaggtagtggtgatgggtgtacaaccttgggaatatactaaaaacgactgaactgtgcactttagaaggatgaatgttatggaatgtgaattatatttcaataaataaaaatcaaacaccccccaccaaattaaacccaaggacagtataaaaggaaggaaatagaaaatagacaacagagaaatttaacaaagccaaaagttggttcttcaaaaaaaattaataaaatagataaaccctagcaagacttatcaaaaataaaaagcaagaaaacacaaattaccaatatcaggaataaaagagggaatatcattacatttaaaggaaaatatgggaatattaccaataacttacctcaataaattctacaactcagatgaaatgaataaatcttttgaaaaacaacttaccaaaactgacagaaaaagaaatggaaaatccaaagagcctccatatctattaaagaaattgaatttgtaataacaatgatgatgatgacaataaacttccttccacaaagaaaacttcagatctagatgatttcactgctgtattgtagaaaacattctttttttctttttttgagatggagtctcgcactgtcacccaggctggagtgcagtggcgcgatctcagctcactgcaacctctgtctccccagttcaagtgattctcctgcctcagcctcccgagtagagcagctgagactacacgcaggtgccaccacgcccggctaatttttgtatttttagtagagacagggtttcaccatgttggccaggctggtcttgaactcctgacctcaagtgatctgcccatatcggcctctcaaagtgctgggattacaggtgtaagccaccacacccggcctgtagaaaacattgaaaggaaaacgtaataacaatcttacacaaactctttcagaaaatagagaaggaagagcacatctcaattcattttttattatcaaaacctgacaaagaccttacacaaaaagaaaattacagcccaatatctctcatgaacacagatgtaaaaatccttaacaaaatattagccaactgaatagcaatatatgaaaagaataacacatcatgacaagtgagtattatcccaggaatgcaatgttaatttaaaagtagaaaatcaaaatattttaccatattaacacagtaaaggaaaaaattcatgattatatcaatagatgcagaaaatgcatttgacaaaattcaacacccattcatgataataactatcagcaaactaccaataaaaggagcttcctcaatctgataaaaatcatccagctaacattatacttaattcagaaatattgaacattaagatcatgagtcaggcaaagttttctactctcaccacttctgttcaacactgtgctagaattctagccagtacaaggtggcaaggtaaaaacaactcctacagattggaaaggaagaagtaaaactatctttattcacagaaaacctgattggttatgtagaaaatcctaaggaatctattaaaaagctactacaattaatgaatgaatttagcaagttttcaggatatatgattaatacacaagaaaataaattttaccaaagacaggaaagacttccaccctaaaaacaaaacaacacaaaatgctgagagaaataaaaaaaaaaaaaaaccaaacatgtagaaaatagattatgtttatggactgaagattcataattgttaagatgacaattctccacaaaatgatctatagactgaatgcaatcctaataaaaatcacaacaaactattttgtagaaattgaaaactactttaaaatttatgtggacatgcaaatgatctagaatagctaaagcagccttgaaaatggagaagagaattggagggttcacaccacagctgacccctgaacaacatgggtccacttatatgtggattttttttttttttctttttgagacagagtttcactcttgttgcccaggctggagtgcaatggagcaatctcagctcactgcaacctccacctcccgggttcaagcgattctcctttctcagcctcccgagtagctgggattacaggcatgcaccatcactcccagctaatttttgtattttcagtagagacgaggtttcaccatgttggtcaggctggtctcgaactcctgacctcaagtgatccaccagcctcggcctcctaaagtgctgggattacaggcatgagccacttcgcctggccatggtttctcttccttatcttttttcctaacattttcttttctctagcttactttattgtaaaagtacagtacataatacatatacaaaatatgtgttaattggctgtttatgttatcattaaggcttctggttaacagtagtctattagtagctaagtttttggggagtcaaaatttatatgcagcttttcaactatatgaggggctggtacctctaatccctgtgttgttcaagggtcaactatatttaattataagtctaactataaagttaaaggaattaagaaagtgtggcattggtctaagaatagacatatagaccaatggagcagaatagtgtccagaaataaactctgtacatataaaatcaattgattttcaatcaaggtgttggatatctagaactaggtatctatatggagaaaaaatgaacttcaaactcctacctcataccatccacaaaaattaatgtaagatggattatagaattaaacattaaaaacttataagcttctagaagaaaatatagaacatctttttttgtattcttgggttaggcaaaggtttcttaaagaaaaattttaaaagactaaacataagaaataaatttcactaaaaacttgcatttcttaaaaattggaaactctctttggctagtcacagagtaaaaaaaattgaaaactcctattcataaaaaaatcacatttaagaaggcaagagaaggcaagtcacacacaggaagaaaatattcacatttatctgacaaaggacttgtagccagaatatataaagaatccctataagtcaataataataagacaaattatgaaattttttatgtaggcaaaagacttgaagagacactccatagaataagatagacgtatggccaataaacatgtgaaaatgtgatcaacatcctgagtcattagagaaatgaagatcaaaattacaaagagatattatttcacatgctctaaaatagctaaaatgtaaaagtctgacagtaatcaaatgttgatgaggatggaacaactgaaattttttttacattgctgataagagtgtgaaatgatgcaatccccttagaaaactatttggcgatttctttcttttcttttctttttttttttttttgggatggcatctcgttctgtcacccaggctggagtgcagtggtgtgatcttggttcaatgcaacctttgcctcccgggttcaagcgattctcctgcttcagcctcccgagtagctgggactacaggttcgcaccaccacgcctggctaattttttttttgtatttttagtagagacagggtttcaccgtgttagccatgatggtctccatctcctgacctcatgatctgcctgcctcagcctcccaaagtgctgggattacaggcatgagccattgcgcccggccagcaatttcttataaagctaagggtacctatcctgtgacataaccattctgttcttaggaatttcctcaagagaaataaaattatattttcagaaaaagactcacatgaatgtttacagcaactttgctcatatagcccaaccctagaagcacccaaaagtttatcatcaacagagaaatggaccaagaagttgtggtataggcatgcaacgggctattactctacaataaaaatcaatacattacttatatatgcaacaacatggatgaatcacaaaaacattaccttgaccaaaagaagccagacacacaaaaagtacattctgtaggataccttttatatgaagtttaaaacaggcaaactgatctttggtgctagaaatcagagcactggttactaagggactagaaatcgactggaaagggacatgagagaacatgtggaacaaatggaaatgttctatgtcttgattgtgtggcggtatacagggaaatgcatttattgaaactcattgaattttacacttaagatccatgaatgtaagtttcacctagttttaaaaaaagaagagagactcacatctaaaatacctaaaacttgaaaaatattatataagatgaggaaaaaaattatttctgattccatgctactaaaaataagctacaaatgtgattcataatagaagaagccatttttatatttagcacataacttaaaggtctaaaggacaagcaagctgggcgcagtggcccacgcctataatcctagcattttgggaggccaaggcaggaggatcacttaaagtcaggaatttgagaacagcttggccacatgctggtgaaaccctgtctctctaaaaatacaaaaaaagttagccaggcatggtggcacacgcctgtaattccagctacttaggaggctaatgcaggagagtcacttgaacccaggaggtggaggttgcagtgagcggagattacgccactgcactccagcctgggtgacagatcaagactccgtctcaaaaaaataaattcaaaacaaaatagaatgaaggagaaacaagactatttagtagactgagaatagctgtttcttattgagggataaactgcaccaaatgctattgtaagcattattatttccttcattttaagggtgaggaaacaagggcaaagagaagttaattagcttcatccagggcacgcaaactaggaagaggcagctgggatttgaactcagggactctggcccaagagccttaacctctatcccatgccccctcgtgcttgtaaaggacttgatgctttacttagactttcccacaacagtttcttgtcatcctcgtgatggtcccaggacacaggctggtccaggataatgacccccggctaacagatggtgagtctgagaccccaaggggttggatggccagctcccaggcctccagaccatgggccgttgtgccgggccgcacacctgagtgggcctggctttttcctgcacgcaggggtgcttgggccctgcttcctggtgctccatgggagtatctggccttcaaaaggaacagatcgatctgaagtggggagagagaaaatacagcaggaccatcactcagagagtcgctgtagaggaagagagggagaggagacgccaggacatgggagctttgtgggagggaatgggactatttgctgagctttgtacagcccagcccaggcagtgcatacaacaaggctttgctgattttaaataacacaaggaaatagcagccccaggtctgagtcaccagcagagttttactctatttctcagctcacacagggacaatagcaatggcaggcactgctgggagataggctagtgggctgggccctggcaaaatcacgacgtccttgaaaacagtcccaggaccttctccttccccttcggatggcccaccacctcaccctctgccctttcgggaccccagcccctctccagtcttgcttccacaggctgctccctgagggcagaccattcttgcttttcccttcaccatcgggactcccctgtcctgtgtccagctccttggaggctctactctctgctctacgctttcaaacatttccttacactgttctctctgcctggatttccctccttctccttgcttcccagtctctctgaatatccagatttcttctggtcttctagcgtcaatgcgtgtgcctctgcaatgcctccttaatccactacattgagagtcattgctccttttcctgtgttctcactttatttacactttttgcatgccaatgacaaaattctgccttgtatcatcggcagaattttccatgtctgatatatctccctctggattgtaatacgctcttaaaggcatcgttcagattcgaatgatcttagtacaactcccctctgtgaaggccaaatggcacacaagccaggagctagaaagccctggttgcctgtggaaatgaatgaacacacatgggctggcagccgtgtccctgcacacctgccttttctcagaggtgtggccctagcagggtaagctgtctggaagagggagctattttgtgcagatggaacattttgtccccttaaatcatgtcccatgaaaggccagcatggcatcctgcttctgaaacaagcactgagctcgtctccatttggagaagatctgtcgtgtgggtatttttaaatggtgaaaggagaaatgggtatatctgataccatggcacttgttacactttaagcacagactctgttattcatactccatctattgactcagggaggagtttatttcaaaccaaacagctcagctatcccaggagcagctgcctcagaaggaaggaggatgctgttctatttcccccatcgaacctccttctcactcgatccacaacagcctttccatgcaaggaagaggctattttctttcaagctttattctccattttccctgtggcaagaaaggtgattggatattgggatttgtaatggttttatctgaaagccatttaaaatgaagctggaatgtcaacaagactgacgctgaatggagtagatgtgaagtggaaatgaacttgaaacaagagatggggttagtcatccccctgatcacttggaacagatgatggaggtcccctgcctctgctccagtgaacagaacagaaccacttgaatactgccagccactgtttgtacataccctcctgaaacggctcttccaaaatgctgaaggacattttgttttcttaataatttggcctttccactgtttctgtatgattgatgtgtttcagcaaaccttttttaaaaaagaatatctacaggtaaatttagctcatcatgtttgagaatattcaccatctctaaatccccagggcctaaatcaatgaggttttagcacattttgaaacagaaccctgatgtataaattctgcaatggctgatttcacgtattttacttcctctctaacaaagctatggaaaaatgcacaagcaggggagggtttgatcctcggtgtttcctgcagatgtgaatctgacaccaccttggagcagggcccctccccaccttctcccaatcctccgctgggttgctgcatttttcactccaagagaccccggaggacagctatatccgaggcttattaaaatcttctaggatgcaaaggcctttggttattcagagcagcaggtctttaggggaagcccccatacacaaacatgctcagctgattctcaatttatattgtgtgttacctgcggggaaaattaaaagctcaaacctcaggcactttccctctcctcccttgattgcccgggggcttgttgttgagatatttcttgttgatttttttgttttttatgtctctggctggtgctaaacattctttctttcccatcatgtttacttcacatctctttgccgtatagatagcttctgctttatggttttttcctccttatctcagatgcagccagcccttccccacctgcccccgccccaaaacacacacacgaacacacaccctttcagactgcatccacactctctgtttcagtggatctgacatcaacgaccccgccacccccggccctcgtcagaggggagctctgcattgaactaggactagctcctgggtcataaaagttgctaggaccctggagagctcttactaaacagatgaggccaccactgacagaggagagaggtcagttcccggagggaacgagcctgctttgctgagcccccttccttgcccagcccccagacccatcacagggaaggttcagaggagctctgacccctccagtacctccttggcctgacgccgctctagcccgggctcccaggttttctgtagggagaggagcacagtccgctccacccatgccatgggcttcatcagtgacaacccaaactcacccccaaataggaatggcttcaacctggagacagcccttcaatgaaatggtttatgctggtggagatttaaaggtattcgtctttcggctgggcgcggtgactcacacctataatcccagcactttgggaggccgaggtgggagatcacttgaggccaggaattcgagaccagcctgaccaacatgcgaaaccccatctctactaaaagtaaaaaaattagctaggcacagtggcgcatgcctgtaatcccaactacttgggaggctgaggcacgagaatcatttgaaccccggaggcagagtttgcagtgagccaagattacactactgcactccagcctgggtgacagagcaagactctgtctcaagacaaacaaaaagggtgtttgtctttcaattgcaaaaatcaagcatggtcactgaaaaaaaattcaaattcacatttcattttgttttgttttgttttgtttgtctttcagccaggtgcagtggctcacatcaaagtatgctgctttcaatatcttctcactctccctccccagggataaccactttcttttttattttatttatttaacttttttgagatggagtttcactagttgcccaggctggagtgcaatggcgcaatctcggcccaccacaacctccgcctcctgggttcaagcgattctcctgcctcggcctcttgagtagctgggattacaggcatgtgccaccacacccagctatttttgtatttttagtagagacggggtttctccatgttggtcaagcaggtctcgaactcccgacctcaggtgatccgcccgcctcggcctcccaaattgctgggattacaggcgtgagccactgcgcccaggggggtaaccactttcagtggtttgagatgtttgtctcttcatagaagaaatatatgcatatagtttgggttttggtattttttttaattaatggagttctaatatacatgctgccttttttcccttaccatggaattgacacaggataataaattaattctaagcaacaaatttttctttaacccatcctgtctctaggtttctcctcacagaaattacaaccccttctcttgtggttccatcccatccctaaaacagtatttatcctcccttctctgtaccattactgtttcttgtgcgaaattgtaccttggagtatgtactgaatggtgttgtactggaggcctggcgcggtgactcatgcctgtaatcccagcactttgggagaccaaggtgggcgggtcatttgaggtcaagagttccagacgagcctggccaacatggtgaaaccccgtctctactaaaaatacaaaaattagctgggcatggtggcggcgcctgtaatcccagttactcaggaggctgaggcaggagaatcgcttgaacccaggaggcggaggttgcagtgagccgagatcgtgccactgcaatccagcctgggaacagagcaagactgcatctcaaaaaaaaaaaaaaaatggtgtttcccttgcactggtgccctgttggctcctggcctcccttctagaccatcagctacctgtgggtgggagcctgtgcctttgtcattggtccatcctctatcccgaggccccgggacatggcctagaacatcagagactccagcggctgtttctcaaagtgaactgaactagctggtgtttcccacacgatggagccccctcgacctgccctcgattctctcctgacttatttctccccacatcttgggccagttccagctggactagcaaagagggcagctttacctctgtgctcccaacatgccctagtgggtggcgtatggatgggggagcctgggacaatgtgtgtccatctcacacactctctacttcccatgccagtggggaaagtgggggcaggaatagagcccgggagggaactgccagagactgtcttctctgctaaggctgacaggaagacggacaaccatgacagtggtggaaggggaaggcccttggcccacggggaatggctgtctggaagctgacttgttgttgggggcctggtttgggcaggaacccctggggtggctgcagaaggaggctgggcttcacagacccctgtcggcaggcaggggctacgccccctatactaggcttctgctcagggcagcagggcccggagccaccagcagagctgaggaggctgcagaggaggctgagagatccatggaggaagaacatggtggaaaagagtgcctgaggtccgcttccacggccactctgaccagcctgggccttctgtgccttagcattcccgttcctaacatggaactcatggcctttgacccgcttccctcacgaggctgctgagagggtcagagaagaagccgcatggggactggcctcaccctgggagaggtgagcaagccacgaggtcccatgttgcatgaaaagtcaaatgctgttaggacgactcccaggatgaggaggtctgaccccatgctcatcgtctggacagctctgaccctagaatttatttcctctttccccacagggcaatccttctactctcgggtcctggagaactgtgaggatgtggctgactttgatgaggtaggaggcccaagactcccccctccctcagccctgagcccagaggggaacagccacccttcgctgcctcttgcgggcacacactggccccaaatcccaggcactggcctgctctgagcccctcacctctcagctgcttcctgaaggaggtggtaaggagggtgtgcaggaactccctcccccatgttccccccagaaacctctgcacaggtgaggcccgtgtgcaaatgacacggggaacagcagcctcgcccacctcgacggccctgctgggtctgggcctgttattccctgtggagaaagagcccacaggtgctgtagacctgaatgtgagccaccagctgagggcccaacgaggcaggcgagtgttggggacgtcgcaaaggccagtctgtgtcagtccccaggggttgaagagcagggcagccccgggcactgaggtaggagccccagtcaccagggaaacattgtcaagcaccccacctgagtgagggcgccatctccagaccttgaggggaagcatagggaacagaagacagtctggattttcagaaacagctctgggggttccatgagaaaagacgtgagctgctggtctattgacaacgatttttctcaatcctcactccagctgggctgttgtcacaattttatcagcaaaggagcaggcgacaccatcccacaggggtgcccaggagcagtgagaggacttacaacgcttccctctccctgcccttcccctcggtacctggccgggctgggagccctatcctcacacacacacaccagctcgagcagcctgcggcctcctccgcctcctcacattctttcgtctatgtgtttgctgcttccagaatctatattcccctctggctgctgtaggttctccagggatgactttggagtgagggccagcagtcatccgtcaccatcttagcacaaactggaagccatgtagtgaccctcaaatagtgtaccccctctctcctggggttggctctcccgcttggctctgtgggggctgggaagggcctcatagcagactgtgcctcttgaggttggctgctggcgttcggctgagcagccaccaggctgacacttggcaccagctgtctccccctcctccagaaaccaggccacacgatgtggctgtgtccatcgacccagagctggagacacagggagcaaaacctcgctcctcactcaggcttaggcacagccatcaaccatcgcggcccagcaccacaccctccccaaccacttcagggcgcagttgccacgacctccctggtacgtccccactgctatgcaggacaggtgaatcactcatttaaagtgaatcactagagctaaggaagtttctgtccttaccttctccccctcctggctgtacaatgacctcagtttctaaacctgccaccatctttgtcaaatggggttggtgatgggtgtgaaggtctctgtgaaatgatgaacaaaatgaagggttatggtgagagtggaatcatggctgcccactgagacagctgtcatagatgcttcaggcttgccccattacacacccggcctgctccctcccctccccatttcctcagtcagggcactgggctggctgggagaagatgccagcagcctggcccagtttcccatagtcctacctccctgggcttctgcccactaatccaccaggcacagcatctgactccctcctcccaagactcccaggggatatgtcagcccaggcgttcagccagggggcaacctgatgccccttccaagggcactgccacccttttccatgcccagcgccttggacacctgagccacaggtatgcacgacattcaaagttaatcaccatgtcgttcctcttcccaactccgcccagcctgcctcagggggagagtctgtctctgctggccctgaacaaggggccacattccgagcatctagtgcatgccaggccgggcttgagatatcccagaggcaggaacctgggctcaacaccccatgatgatttgtatgggagcttagggatggggtagccagagtcagtgtggagagactggggcagggcagaagcagttatggaagaagcacatgactagggtcagagagcagggcacgcgatggggagaagaggctcctgcccggggaaagtgctgcccgcccactggggagacagggaagtttctggttgttgcaatgaggagcctactggcatttagtggggtggggagcaaggatgcagaatgacttgcaatgctcaggccatcccgcacttcccacctgggagccccgtgggaagatggtggcagccccagcagcagcactgagctgcttcccgagccatgccccttccactcaatctccgaaatcatccacagacgaaattaggctcagatggtaactacccttccccaggtgacagagctggaagcggccaagccagggttctgaattcatgcatagattagacctaagccctctctggatacagtgatagggcctgactcccaccacccctgcaaggcccgtgttggagtctctccacaccccctgcctccatttctccctgggcaaagtggcctcagccctggccaccaatggtcagcagtgcacatcccacaaagcaggaaggccaccctcccattccctgttcaggaacggcccggaggcctgggtcagcccagtcccaaaggtagcctggagccataccctggctttaacctttctccctagacccagtggacaagttgtaaacttccctggcttccccctgaaagaatctgcctgccagtggttccagaatatcctgggaaagagccctttcaaatccccctgaaccttcttgactttccagaaagcctcttctctccgtcttactctgcccagggcctgccggagccagcttagtgagacacactggcctgggagtcatgagacctacaccacagtccttgctgaggaacctctttgggctttggattccccttctgtaaaagagagatatgctccctgctctatctgccccacgggactgtcacaaggctaaaaaaagatgaaatgagagacaagaaagcaaatgtctctcacagctctactaggtaaggggttccaagcaagggaggggcccctcctctgctcaggcatgggtgagaggggctgcagcagctgggcttaggaacctgagtggggaggaggatgccatggaagaaagacaatgctctctacaacaatgggtggaaacagagcctggacatggtgtctcctttcccagaggctggaacctgagcccctacatttaacctacaactctggaaaagctagggagagacagagaaagacccagcctttgtgacctggggaaacaggagtagccacctttagccagtttggtttggctctaacacaggccctgtgtggagcaggccccaggggagaggccagagtaacaatagtacttgtgccaatgataagaagaactgctgctatttactgagcacttagtgtgtggcaagatgggctgagagcttgacacaagcattagactcactagaacttgctggattggtagcatcctaggtgataaggagccacaacaggatttaaacccgagtctatctgattccaggacctatggtcatttgtaaagtagacaagactcagccctgccctcaaggggctcagtctagcgggcagatggacccactacaaacaaggagggaccctgggccttctgagccaagaggaagaagaggtctccagcctgggggatgacagggcaggggagtttggccttatctgcccctttctgcttgtaccaggaagtcatggctgttacctcctggaggccagaaacgcacctgtcttgttcgtcattggcctggcacccagcatggagttgagaaaatgttgccgagtgaaagaatgaaaaaaacagtgacgttcactaggactggcacctgtcaccgcaggcctgtgcccagaccgagtgggctcagcagggctagtggtacatcaagccctttgctgtggcctggatagaaaggaagcaggcaaggcacagatgagatcacctaaagggactttagatcaccttgatctctaaggttagagatcatctagtttaaccctcttgtcttgcagttgaagaaacaggtcttagagtggggaagagaattgcccaagaagaccagctgagatctgagatcctacatttaacttacaactctaaagaagctggggaaagagacagagacaaagacagaaacagagagagagagacagagacacagagacccagcctttgtgccctgggaaagtgaaatagccacactcgggatactgagcccaggcctttaagcttgcaaatccgtctctttccattgtactctaaagcagcagtccccaacctttttggcaccaggggctggtttcgtggaagacagtttttccacagactgggatggtggtggctgggggttatttgggatgaaactgttcctcctcagaacatcaggcattagattctcttaaggagtgcacagcctagatctcttgcatatgttgttcacagtagggttcacactcctatgagaatctaatgctgtcactgatctgacattagatggagcttaggcgggaatgctcgctcacccgcggctcacctcttgctgtgtggctctgctcctaacaggccatggactggtactggtctgtggcccgggatatggggacccctgctctaaagctttgtagtgcatctcaatattttcccccaaacctatagccctgtccctttaaggatgctaccttgctgatttaggatggttccaggcccactcagcggccaagctggacataatccagatcattctccaaggtacatcagggaaaccttttttgcagagtcctagatcactggggctgataggatgcagaaccctgtgccccggccagcaccagccaggtcagggctaagcctagaccaggaaactgggtcaggactcagcactccccgggctcctgagatcactccctccaacagaggccctctttccctccctatctgtactacctaccaccttgcttctgtcaacagtcctatcccaggctgctattccaggtctgtgtctgtctccagaactatccaggaccatccccaggactgagaaacaaccctgcatccctgcgttctgcacagcgtcatgcacagagcctggcacacagcaagtgctcagcaaatgttcgcccccagcatggggcttgctggctcgtgacatcttgagtgactgtgtttggcttaactgctacttgagtcccccagcagtaccaggcttcaggagaggattcagtgtagtggattaagccctgaggactgaactccagactaagcatcctgagacttgagtttgaatcctgcctctgccaccaaccagccttgtgcccgcgggcaactctcgcctctccactttcccacttgtaaaaggagcacatctttgccatgttgctgtgagcttggttatgggtaaatgtgctctggaagtactaagtcctacccagatgaaattcttccttcagaagcccttttccttcagtctttttttttttttttttttttttgaggtggagtcttactctgtcacccaggctggagtgcaatggtgccatctgggctcactgcaacctctgcctcccaggttcaagcgattctcctgcctcagcctcccaagtagctgagattacaggcatgcaccaccacacctggctaatttttgtattttagtagagaccgtgtttcaccatgttggccaggctggtatcaaactcctaacctcaaatcatctgcccactttggcctcccaaaatgctgtgtttgcaggtatgagccactgcccccagccccctttccttcaatctaatagctcacaagttcaataccatagtcaggagaggagtgtagctcccaaaccctcaaaatcctcatctcgtcttgctgtgttctcagcatatcaccccaaatggaggaaaggacataaccacaaaaatgaggagacaatgaaaaatgaaattagggaagagaagatgcagtgaaagagacacgtgaaatccacaggccgaggcagaagaggaaagtgatggcggcgaaggggagggaggtggcatgacaaggagacaaggcagttgcagacctgcacagagttcccactgggaagatctaaactaaacacattctgccgtgctgtgtcacttacgactgctgtcacctgtgagatcccatttgattctctcaatagccctctaaggtagatattgtcacccccctcttttcacagatggggaagctgaggcacagctagtgagtggcagagccagggctagaactcaagtctcctgactcaaactcagagtttctgcaacaccacggagactcccagtctgcgtgagatacaagcctcggtgttgtcagaagaacaaaaaagaagcaaagggtgggcatgtcctttggagctctgtgaggtgcccagagctcacagaggctgcctcagcaaaggaaggtgtcagcaatgggagatggggctggaaatgctgtctgggcacagcaagggggcctctgggtgctaggaaggggaatccccacctctttcagggagctgtagaggagccactgaaaagttttaacaaaggagagataaaaagagaggaaaattcaaccccaaaagtctccttcttacagcccatgcctctacttccagggaggccaaatgggagtaacccccagtcccagaccctgagtcacttccctccagccaagaggcccgtcaccctccgaggccccacactgatgccaggaccccacctagaggtgccggcttgatcggtctccaggctgggccttgggatttttaaaagcttctggaatggattgcagttccagccaagatgaagaacccctgagaaagacagagggagacagagacaaagggagagatagagacagagagagaaactgatgaaagaaaacagatgtggtgaggagaagaaagcagacgaatgatgcgggagggaaggaaaagaaatgaggggaaagcctcgtgtgggtggaaaatgcgggagggagacaggggaggaaagaaaggaaactgtaaggtgggagcaagtcagagaccgaagaagctgctgtgactcagtgaggaccctgtcttctccctcacccggaaagcctccaagaagaacattccccgctgacataggcatggactgcccagacccggctgacgaatttctgaaagggcacctgagccacacacctacacacgcttcccctgattattctcatctgcagtcaggggccccggaagccccctgtctcctgtgccctccctgtcccccgactctcactcaacaaactggccctcgccccgcagccaggcagcctccctccccaggtcccttagcctcagcctcccgccaccgttcaacaccccacctccctttcacagggccatctccaaagtcatgtcctttttctcctgatctttctctccttccaatgccaaaatcccacccacagaccctcagggggaccaatcacccctcccctcttcatccccagtaaaccaaatctcggtggctcctgcggccccccgactcccacacagcgccctggctgatgagctgggccttcctgggctgctttatttccctgcagccccataaaagcagcttcattaagaaaaccacacactctgctgagctgccagaggcatccagaagctggagccgcagccgctgaatgaggcctgtgggccgggctgcctccacttcctgggactctcagcgcacccctccgccctgtgcccacctcgcctctgaagccctccctaggccctgctcagaaccctccccaccccaccccgcagacccctctcccgctcctctgcttcttcctccctctcatgccaaggccaggtcctcccttgccagtcctgaagggagatgtcacaaaggccgttttcctgagacaggccctgcccacactgggcagtgacccgcggtgctggcccagtgtgcccaagccctccaagtccccaggctgggagaaggaatctcagctttgggaatggcaaacgtgcagggtgggctcacagaagcctcctcccgagggcctgctcagccagcaacagagtgctccaagtcatgcatctgctctgaggccgagttccttgtttatagagcacagaagccattacccacctctccggccattggaaagactaaatgaatgaatatgcacgtagagcattcagacctctgcataagaaaaagttccccagaaatggcagcgattattactattattatttattactggactattgagcagtctgaatttggtagggtataaaaatggaactaaaaaataaaaagtcactgccttctaccagatctgtcaaaatcctccctgacacggtctctccacagcgtcttgagcagacctcagcgttgtctggtcctgtccagaagggcttcctactccagtctggcatcctgttcacccctggccatcctccttccctcatgcttgtggctcaggatgtggagtgggacagggacccctgctgaggccctccacatcctcccctggtgggcagcccatggaaaaactgtcctcatatcactctaccccacttggccaatggagcgcaaatagatgacttgccacagccaacagtggcaggctgggctccttgccctgctgtactctatgggtctcctgccagtccactgccctgcagatgccactggggatttgcatgccatgctgcccctcttgcaggtatctaatcaccatgagctgtttccccaagaagtaccacaaaaacactacgcctaggacagaattcttcccacctttcccttgcccagtcttctttcccatcccaggaaggtgggctgggtgatggttggaggtaacagggcctttgaggaagccctaggaagatgtctggctctgcccattggcagctttttacagaatggggcactgggccactttagcctctgttttgagccattgttgccacttctagggcaccaggaaaaatcccaatcaaattcctactcatcattaacattgagttagggaggaagcaacgaagaagtggtaagggtgaatctagaaacaatgagttggggacaggctgtgggcctgaccccaataacactaatcagctcaaacctgtccccagtgttaccactggcagagtgaggagtggtttgaactcaacacaggagtctggggcagagcctgtgccagtcagggtgattctgatgagagagagctggaagctcacagctccattcagcacccaccaaaaaccaggctcacacccacattccttgctgtctccctgggacccgaccaccaccctggttgcaccaccctctcccaacccccctcaggagctgggaggccatggaagcagcgctgtgtagggagtcaaaagtcctggtaggtccaggctcttcacctaccacatgaccttgggcaggtcctccaacatctctgagcaccatctttgaaagaggagtgggcaacaatgccggctctacaaggtggttgttggaactaaatgagattccaggtgtcaatgctttgtccctggggagcactgggcccaagtgaggggccactctgactgttggagatccccacaagagattcccctcccacaccccacggctcctacctgttattgccaccgaagccgcagttgtccctctctccccagacatttcggtggccggtggccagcagcatcgacagaaatgagatgctggagattcaggttttcaactacagcaaagtcttcagcaacaagtaagtgtgggatggggcaggaggggctgggcctggacgggctgggagcctgctcttctccttgggctaccctctgtttggggcttaaaaaggggacctacactcccaacctgccctggattgatcttcaaagaccgaagaaatcttgggctggtctttgatccccattttgatccctcttcttgtcttcagaatcccccagttctcccagctgctgtcagccaagaacactccaccctcctatcacctctgctgtctccaaccccatcaaagcttcctgtcttaaagacttaaagctttaagtctccctcaatgccacgctggggtacagttacccactggagaggcgaaaggtggaggggctgatgatctcctccaagagacactctgtagccctgagggcaggcttgacagtttggggtggtggtttaggagtcaggcaagcctgatctcagacactcaggtcagtcatctactgtgtgaccctggaaaggttacataacctctctgatttcaatgtgctcatgtgtgaaaaggacaagtatttacctcaaagggcagctgtgtgaattaaatgagatagatattcactcactcattcaacaaatgtttactaagcgtcgattgtgtatcaggtactgaattaggtgatgcagagggcggggtgcctaccttcatggagcttgcactccacaagtgaagtacacctgccatacgagcgttatcactataaggtgttcaataaaagtagttgtcatccttctctctgggccatgagaagaattcagaaggatttgaacacgctggaacagtggctaagtaatatcttgggttaaaaaatcacagccaggtgtggcacacacctgtagtcctaggtccttgggcagataaggcgggaggatcatttgatcccagtaatttgaggctagcctgggcaacatagtgagatcccatctctttaaaaaaaaatcggttgctcttatacaagctggaggtcatggcttaactgtaacatgtccaagaaggtatggaggtgttagctcactgaggactcagaatgactcaacagtgggaggagactacaaacaaaagaaaagtaggcctcatcctaaatcatactaatagaattaaagcactcctgatctgagcaggagagacaaggagtccactgctctgatactagtggcagagaattcctgtaggcaccaccctatagtttccaggaggaaagggactttaagtgttaccttataacaaatggatgagagcctgaaagggaaaatcatagaggacatattcatccattcatccatccattgatccattcatccatccatccatctatcattcctgttattcatccatctgcctatccatttgtctgtccatcaattgatttatccacccttcctttctttcatccatccttccatcctttcatccatccattcatcaatccatccctccatccatttatcaattcatttatccacccatttatccatctatccattcatccgtccatcctttcattcatcctatccatccactcatccatccatccatccatccattcacccatccttcctttcatccattcattcatcaacccaatccttccatctttccatccattcatccaccacttaccctttcatcctttccattcatccttccatccactcatccatccattcatccatccttccaccttttttcttttccttttttttttttttttttttgagacagagtcttgctctgtggcccacagtggagtgcagtggcctgatctcggctcactgcaacctccgcctctctggttcaagcaattatcctgtatcagcctcctgagtagctgggattagaggtgctcaccaccgtgcccagctaatttttgtatttttagtagagatggggtttcaccatgttggccaggttggtatcgaactcctgacctcaagtgatctaccctcctcggcctcccaaagtgctgggattacaggcgtgagccaccacttttggcccatccttctatctttccattcactgatccatctatcgatccatccattctttcattctttcatccatccttccatccatcatccttccttccatccattcatccatcctttcattcttccatccattcatccatccatccatcttttcacccaactttgcagtcactcatcatacatatagtgaacaaatgctttctgccagtcagacactatgctagtcactggagatactgagatgaggtattgaggcacagtccctgcccctaccctcccagaaggctttttgccacaggaagaggaaagaaaggtgtgtacctagaggcaggatgaggaacaggctgctggaagacagcagacaactgaaagatagccagtattttccagccaatgtgctgtcttaggaggtagtgagctccttgccactgggagagggtgagcaaagagtggaccacattgtagaggggatttctgagtcaggaaaggccccaccatatgggctccaaggagtctctgattctgtgggttttattaggagctttcaaaatctcagctgagtatggggcaagggcatttcagaaatgctgtcagggccacagggaggatgtttagtgcacaaaggccttccctttgcctctcatggcatcacaccattcaggcagctgcttttggcacccacaagcaaggttggtgagacaccccccaccaggggcccccaaggtgaagcagagccttcttccctggggtgagataccatgagggtgtgacctatgaggacaggagaaacaggaacaagtggaaggctcacacacagaccaagtgggtgtgaaaaaggaaggagaatcggaagtcaagcaccagggagggcacctgagagcccctgaaggaacccaaccataggtgccaaagcatccaggagctttacagctcagccactacagccctagctgtgcaggaggggaaaccaagtctcagaggggaacctgaggtcacatgggtagacaatggtagagccagggctagaatgcatgtctgttaacttctcttcctaatccaactcccagaaaccaaaatatttgagcagtgatggtggaaactgagggcatggaagacattgttaaatcatttataatgaaagccaccagcctaaccactgaaatgctggaaacacttgagcccatcaaaagactgctacaaacaaatcagaagtatttgggaaatcgggaaattgactcccatgcagtgaatatgttgaaagttacagcttctattaggtgtttttggtttttgttttgttcagagacagaatctcactctgtcacccaggctggagtgcagtggcctagtctcggctcattgcaacctctgcctcctgagttcaagtgattctcatgtcttggcctcccgagtagctgggactacaggtgcatgccaccaggcctggataatttttgtatttttagtagagacagggttttccccatgttggccaggatggtctcgaactcctggcttcaggtaatagacctgcctcagcttcccaaagtgctgggattacaggtgccagccaccaaatccagcctgtattagatgttcttaagtgccaataagaaggaagacagaaaggggaatagttcctatcctaactctcctcttcttccctccctgcccccatccaagagaaggcaggaaaccccacaaggggaggcccaggcctggtgggagaggttctggcatttctttggaagcctagagaatgcccagggcactgctggctgcagagctgagatgggaaagaagaggtccccttgtggagagcacaggcccaggctgacacaggccagcttgtgggggtcagagtgggagagaggtgtttggaatgatgtgagactcaagtctccccatcctggcatttgcctgggccaggccagaggagcaatgaggccactgccctcaacccccacatggcccagttcagaccccaggctccttctcatggggcagctgagtggaaggggtctttggggtctgcactaggcttagcaatgagcaaagccatggccactgctggggacagtgcctggcacatggcaggctcctgattattttgtggaataaaagaatgaataaatgcccctgtggtgttaggaggcagagggtaggtatacaaggtgggagagcctttgagagggaatcggagtggcccctcttctctgaaggactcagggcactcaagggtgacactcagcatcacatgaccgatgcatttggggaaattgagctaaaagaggcatggaggagctgcctgggagagtgggtcccaggacgagaaatgagcctgatcccatcactgccatctcagagagagagacttgtcctagaagcagagagtagcttggaaactggcccctcacccagtggttctagaggctgccaggaggcagagacatggtatgaaggaaggaggcatcctaggcagaaaccaggagacctccaggtctgcttggccccgtttggaacaaagacctgtgtccaggaaccttgggcttccccatgagaaagaaatgttcggttcagaagattttgtgcatccagctctgcctgtccgggacctctgagggtccatggcctggcctccagcctcctgcctgctaaggatgccagggaccctgaataattcaggagccaggacagcaggagaggcctcgcagggcccaggacacctgacacgggctcccaggggaaagtgatgaattattgacaggattctggtgcccagttgccgctctattgtgatcagtctgtgggcccatctgggctggaggccttttcctgccggctaattacgtggggatcttagctctgcccagccgcccagcccctcgtggggccagacagcctcctgtgaggggtgtcctctttgccatggtgacctggatggccctgtaaggcaagtagtcagaggacatggagttagccccagatcctttgcctgacagccccagggaaactgaggcccagagaggcctcttgtccagggtcacacagcaggttcaggacagtcaggtcttcaccccaggcctcctgacacccgggccagtgctccttcccacagaacacatggcctcacaactccatttctagggaaatgactcagctgtctaaggagcatatgagcccacccttcctcaatcgtcctgggccccactctcccaggcagctcctccatgctgacccatgcagaggagtaagaacctactatgtgtgcagccaggatgcacaaaggccagctgcggcgggcagggtcgcctctggggtcaccacaagggccagagccaggggcttctcctacctcttcctgtcccagcttcttcccaaagaatatctatagaagacgggctgagggatggcatcctagaagcagtgccagggcctttgttttgaaactgttttcatggcaagcactgtgtttttgcttaaatggtatgttacagacctgtagaaagagtcaaggtttataaaactgcttttctttatactttacataaggctgagataatatcaattgtccatgtcaaaaaatataatttttacttttatttgagagaggttggggggtgaactgttaggagttaaaaccccccaagccactcttggaggtgtggcaaattgattcctttaatcttgcaagctcctagcgtcccagtcccaccctccaggccatagacaagctctggctgtgcgaggctgtgcacagcttgaagggtgggggactgcctggacctgcccctgaagcccatcctgcaaaggagactcgccctgtgtaggctctccagatggccagccctgctcattattagggagggaggaggggctggcatccgagtgccggtgttggtagaggaatttcacatgagcagtctcctcaccactgtccggtggaagtcggagggctatagcagaaggagccaaaaccacactgctgccaggaggtggaatctcccttgggtcctgctgagtgagcccacatctgtctgactccagagcccaggctcctcactgtctacaccgcttccctttagggatggaattaatctgcatgtggacagggcttggaccagggtaggaagagtaggggatttgcctggaggccaatcttgctcagcacactgtgtgattaaggcagtggctgaatggactaccagtgacagccccatcactgtcaccaccaccggagtatctagcagggacttaaaagcacatgtcagggaggttgtttcagggattcctcctggaaggggcgctggacaaggtctctcaggttcttcccaagtataagatctgagattcaggcaggttaagcctagaaggcaccagacgcctctgtgagcacttgcagggggaatagctccaccctgccccctgggagtgtcttgtcacattgcagcacctctgcggatcctggggagctgccttggctgttcttaggcatctaattctggagaaagatgtgcctgatcgccccacgctcaacaggtgctcgacaggtcctaggggaatcaaggcagctgaatagccatccacaaagggtaatagtagagcagggattctcaaagtgtctccccagccagcagcttcagcatcacctggaaacttgtcagaaatacacattctcaggccctctcccacccactgaatcagagccctggggtcggggccagtggtgtgaactgaagtccggtggacccagtttggtgacttcacattagaagcttgaagttggccatggcgggagtatttatatctcagaaaccagcaaatgctacagatgagcacctctcctctcccaccagtgacacattttccagcatatccacagaagaggatatcccagccgtgcatgttttcacaagccctccaggtgattctgctcatgctgaagtttgagaaccactgatttagaacaaaaaggggtgaggctgcaaaaagatgagtgtattttttcgtgcccgtggtctactgttagaatgtctacatggtacggaagctaaaagtccccttccctcttcattttataaagaccaaattgagactcaggggcagcagctccagggctcctggcccccagcccagcacttctgtctctggggcactgcctgagctgggagaggtgcatgcagctatggaagaaggcttccatgggctgctctaagggcccagaagcccagttcggctttagagtgaaggagtggcgtggtcagtttcatcctcagggaggtggggcacaatggtggttggggctctgagctccaaaggggagcatttcatatccattcctcatggctgcccctaccacttcctcccctcacacagatgggaagatttttaaaaaatcaatgttcaccctccacagacctcagggtggtagagacatgaagcatgtctgagtcagaattcatctgatacctcacctcacccagatctaccattaattagctgtgtcccttccccttccatggcctcactgtcttcctctataaatctcaggcagcatcagatgatgcccaaggtcccttccagctctcacacgccctggatgcttccctcccctttgtgccttcagctagaaatggtgtgtgtattctaatccactctatgtggaagcaccatgtaagaacgtctgtctgagttccctgttctctcccagagcaacaaacagccttctgactgtggggtgcaatggggttgaagtcaactccatcagcatttattgggcacccactgttgttcattaattcagccagcagatattgagatctctagtgtgctagaaatgtcaaacagaggctagaataaaaagcaccacccatgcccttgagaggttcacagtttagaggcagtacatgaatcacgacaaaacggactgctttggagtgctggctgtgtgctgggggctttgacaagaacactcgcagatgatctcattcagtcctccaacaacaactctgtgaagtagggcttatcagctcatcttatgagaaaaccgacactgagagagcttaaggaagttgcccaggaagcaggtagcttgctagtcagtgtcagagctgggttcagatccctgtctctttgatgccaggactgtgctgttaaccaaagcattgcaccgcctctcccctgctgtgcagttccatgggctctgccatcacacaggttcctgccatccaggaacttacaggctgcagatgtggaatggatgagtgagtgctgttggtgtgggctggaaaccttggtcatggttaggcgggtagaagccggaggagctacttgtccatccaggaaactcaggtcctttcccagcctccacactgagcatctggaagcttctctgcaagggctcagctaaagctggatttcatgcacctttccccgcagtctgtagacatcccctaagggtgctcactgccccttggagctctcccaaggaaatgggcctcccacaaacaaccatccacagtgggacatgctgccctggctgcaaccagtcctggctcctgggccaccttctccagcccagcccagagctggagcaagcccacctgagtcctccccaagcagtcacagcccttgggatgtcagtcttgctcctcaccctggtctcttccatgttaccaccgtgccccctctgccatccccaggctcatcgggaccttccgcatggtgctgcagaaggtggtagaggagagccatgtggaggtgactgacacgctgattgatgacaacaatgctatcatcaaggtgggtatgccccacggagttcctggactttcccatatggggccatctgggggtctgttctccctgcctcacacatggggtggtctggggaatgcctctcatgcatggcgaggtgtcgcaggaggaggagactcaggtcagactctgctggaatggctcaatctgtggccatggctggaggccctgtggcatggcagggtctgctgccccacagtaggcacccctgcccttcctacggtgggaatgcaccaactggtccttccatttggacccagctcaggagtcactaaagaggctccttttgtcatccaaaggccagactgagccctgctggcactcgagggcatgaccttcactctgcacatctggctcgggtcctccctgggagggcagggacctcatttcctattgtttgtcacatcccagcacttttgcgtgagcacgcgtgcactagtgatgcacagtctagaggcacctgacacatgttctaacaaagaaggaagcaaccctaccaggacagcctggccccaggctctgctctgattcttcagtcctcttgagctcagccgtggccactcatgggcagttggcatgatggtgaggaacagggaccctgagtatgaatcttaggctgctcactaactgtgtgacttaggcaagctacatatcacctcaaagtgagcacaattacattatccacctcccaggactattctgaggattaaaggacaatacacagaaagtacttagcacagatatgcacaataaatctataatattgttagctattatttcctgacctcagtttacctatgtataaaatgggactgtgccatggtcccccagtggggtcctgtgtaatatatggccctatgtagtggccaagagaaacagcctcagaagccaggactgcagccacagggagctagaacagaaggaaccctcttctcccatgggcaggggtggcagggagggcttcttaaagttaccggggtctcagccaccacagcaaggggagaaggggtgcagaataagctatgtatggacacccatgggaaggcgggctgggaggagaacacagaaacctggatgaagagtgtagtgtgggaagtgagataagagaattggggagtgagcagggatggacagacagcacagcccatgccctggattttcagaatcagacttaagatgtcagcagaggaaaggactcacggatctcctagcccacttgccacccatctccgctacccattgttatgaatgggaacaatgaagtcctggatggggaatggattcggccacagttgacagcagggccagcacggagacccaggacttccaatgccagagaccaccattttcccataacaacatacttggttccaccaagagggtcccatttgttccagaaaggacatggggcttggagttaggcagcctgggctcagatcccagctccagtacttcctagctgtgtgacttaaagcaagtaacttaacctcctgatatgctaggtaaggtaggttgcaatgttgaaaagatcaaatgagtgtacattaaagcatcttagcatgatgcctagcacagtgaggattcagaaaatatgtgcacctttcccttcccttgggaaatctaagcctgggtgctggagcatccaagcactgagtgagggccgcctgtctggggcacaggaccaagtcacctctagaccagtgaggaagggtgatccctgtgcactgggggggaaactagagctgcaagaaagtaatggctccaggacgcagagcaggaagcccaatcatgactctccactgctaagcctgagcccggttgagtgctctactttttgccagaggaaaaccctagggcagctcccaagattccctccctctccagggtaggaagggtgagtgtgagcctgggccctgggctcctctcccggaggccactttcagctcattctgtccatttccaacaagccgatttctggcgggccgcgcctcatgcctgcaggcagcccttgttctgaggagaggaggtggcctgatcatggggatgctgaacgacactctcggttatgtagacagtggactcggggggtgagtccaggctcagttgtcctgggcaggccaggcccctccaccttgagcaccagggaggagtggaaccaccagcagcgggacctggagccaggtaccagtaagctgacccggtctgcacaagtcagcctttcagagcctctgttttctcatcagcaaaatggggcagaggggatcataccatcctgacctcctccagtgaggcaagggtgtggaagcgctgtgtaaacaccaccaagcagccacatatacggggtggagattgctgtcaccatcccagctgctcaccaccgcctccctcccttcagaccagcctgtgcgtggaggtccggtatcaggccactgacggcacagtgggctcctgggacgatggggacttcctgggagatgagtctcttcaagaggaagagaaggacagccaagagacggatggactgctcccaggctcccggcccagctcccggcccccaggagagaagagcttccggaggtaacaggcaggacccctctggctgcccactgctcccaagacacggggaagagacctggggcctggtcctactgacaggcctctctaggcctagctgggctcagagtacagggctgagcttctggagagacatccaaggggtgggaagatgtttctgtagccccccacccagccgtccacccccgaggtcactgggcagggagcaggagactcagatggagctgcaaggccaaggcctccccagtggccctgagggaggtggagctctaacacagggatggggctagatctcctgcctttctcagagaaggggagttggggataggagggcccctggcctctctggttcaagacccagcagtgtccaccaggtgccggcagcctgacctctaccctggcccagtgaggaggcccaagagagggcagctcttcctgccagagtgaagccaaagatcctggctgggccctggcctttcttcctcttgagaagggagggtacccgggaacccccagaatccagcgtcacgccctgcaagtgtcctgccacctatggatcacaggaagctggatccaggacagctcattccacgtgcactatttttacaaaacagaaaatgcaattgtattactattagagaccaaggggacagaatctgggctagtctagtaagatgttgtccatgggttcctaagtcactaggaattatgtgttaaatgccagtaagtcaagggtgcatctgaaggaccagggtgtgttttgagaagggaccctccgtgccactggaaacatatccctgtaagctccttccacgctttcctttccaagtaaagtttactcagtccctctgctgaagaaaccataggttctaaattagtgtaattgaactgacatacttttatgggacaaatatgttttctcctttgcacttgaatgagttcacacccccttaagcacccctcacacacaggtgcatgagtgcacacgtgtgcacatacacatacacacacacacacaagcttcagaaaccctgggagccagatgagtaatagtaacaaggtcaaagtgaccaggcctgcaacaaacatggcgggactgtctactccaggccagccacgggcatggggcagccccaggctagcttaaagcctgtcccctcagactcctggctctttagcagaaaacccaggcctgagtcctagctctgcctcttactagtcgtgtgacccttggcaagtctctgaccctctctcctcacctgcaaagaaggacatagcaaggaaatccccctgccctgctgctgggagagccggagggatcacagaggaacaggtggcaatggaggtgctgagcgctgcccatgtccaggctggtgacagacaaacaggtttcttgtagcacaacaatgcaaagagtcaggaatcgggttggaaattgtgagaagaggagcagtgctcagacggggagtgaagggatgctgactcagtgggcaccacctggtcctcctcgactgtctccattcagaaaagaggttggcagggctggtccagaaaccagaagccgggctctaagaaagagcttccagagaacaagatcggaagccacacaagggccatcagtcacagggaaaggaatgctgaccccaaatcaggagagctaaggcccattaagtcccatcttgactgtgccactcattggctgagtgacactgggcatgtcaccagcccctgtaggtcagtgacaggaatgggttcagcaagttacatctggctcccctccaactctgaggtcctaagggacccatggatgctccggacctgtgggtcacatccatgggaaacaacatcctgggagcccttagcagccacgaaggcaacctccctggggtggcgtagcaacacagagccagtttctcactcagtcctaagagagtgggccagggtgctgatgggggctctggagagcttagagtcccagagagccctaggcaccaggaatctggagataagagggctcccccgacccttcctcacagcctggtggcttccccacctctccccatcttcgtgtggcccctcccagggtagcagcaagaagcgggagcaaaaggaggggcttcaccccggactgggaattgggagagggtgacagccgaagccaggcacccccaccctgcattgcaggggcagtgtgcaggagcacagtttccctgctgccactggggctgccagcccaggtttgagagcacattggggacaggcatcgctgctacaccttctcccgccaggcctagccatgcagccagcaggcctggttgtggaaaagaggggttgagaaaaattctagagatgggccatttgctggtgaggagaaggtggagcgggttcaagaacttggggttttcctgtagcttaatcctggctgcccatatggggccattgagttctgggtcaaggagtgctgaggtgaggagggggacctggaagctggccccgcagccctagatgttgcatctcacccttgtcacatagtgtgggttctgggaggaagccagagagctctccagaagggacttggccaaccttttatcaggaaaacacctactccttaaagaggacaacaccggggaaggggtgtcagtgcctcacctctgaccccgttaggagcccaggcaggcttcccctgcatctgctccctgccctccatcctctcctgggaaggccaatccccttatagatcagggtattcaataaccacagttccctcttgttcctgctttagccacaatgagcaagaggaaaatcccgttgctggcaagcagcagtgtctcaccggccatcttgaccgttagggtccggcgtggggatcagccgctccctggctgatggggtgaaatgaaggcctgctgggggctgcggggaggtagactgagtgggcaggaaacagcctcagcccagacaggccccgggcagcccaggctggaatcttccacggatggaggggaggctgatgccaggagatcctctgggcactcctcacctctccctccagggcctgggtccaccccccagccctgccctgcctggcctgcttctctgggacttcacccacattcatcctgtcctcactctgggggtcagatggttctaagcaggggcagtgtggacctcaggcctcagctgctgtgacactcactcctaagaccctaagaatctgccatgaagttaccccgttcctcctcagggaatcagtatgggggctctgcctgaatgaccaccaaccccaccgcccactgactctctgccccaacgattccacctcccctaggccctggtcagccgcatgccctctgagccactctgcccacttctctagttcctgccacgaagccctgatttctgccggctttttgcacaatgcccccggtaatgtgccaggaagctgtgctgtgtgacagagcacaggctccactcacagctctgctattgggaacccccctccccatttgtgagatggggctcaaggatgcctcacagaagtgccaggattgagtgaggtgcacctgcgagtcatccacccctgtgcctggcatgtggcaggtgctcagccagtgttcacttccttcctcttcactgactccatgttaccctgatgtcaacttctaccccgagcagcacctgaccctcttgttcaggtgctgtccaagcaccttctcagctcttgctccccaccctataccaagggctctgcagaagctgcccacacaggagccttactggcccaggggcaggtatagggagctcatttactcaaagttcccctcacctccccaggctctcagtgttgcagagatgtaatgaatccctaacctcatgggcgctccactctcagcagcacaaaatcagtgttccagacccttgcatggcagcgtatgcctgccctagtctctggagagaaagtgacttcggccctgaccacactcacatgcacacacatgtgtacacaagtgcccatgtgtttgcacacactcacatgcactgcatgacaccagggaggactctggattctgggctctgctgttgatgctgtctttaggagtcacatcttagagaggacaaagaaagaaatcccagctttagtcttgcagctaaactgtagagacctgagcctttcctcctgagtcccagtattctgcgactatctcctcttctcattttctccacctggcctggctctcctgccctccacgacccccacctccttctgctgcccaaaccctcttctgctggtctcctctctgctgggtctcatctgggaggagtttggggcaggagccacttttctcattctccttattgatcattcttccactccagtggaggcctgcagaagccaggtaacttcctcctatgctggggccagagggcagtggggcacgtgtgcatggtggggctctgagacagaggggcagagagtgggcatgcagaagtgtgtgcatgtggggccagtacatgcagccttaccccaagagtgtttttaaatcggtttccacagcccctagagagctagaaaatcctctgctgccttccttctccaggctgagccccagagttgcagcagctcccaaagctgctcagatgagccggggcagccgggcgcactgggattttgtgcttgagacacattcctcctcctatgctgtgagctcttctccgcttagtagtctcagctgatgtgggcagccgaggcctggctgatgttaacacctttgaattacagactgacctgcttgcccaacgtaaaggttagctggccagcgctggactgcagctgtgctgtgtctaggccttcaggtcttgagccatcaggatatgcagtcaagtctacctgggcaaggcctgtgccagaacagggtgtgaggagaggaataatttgctaattgttattcactttcctgtcttcatcctcattgccacagcactgggaaagcattgagagaacattccagaaaagttttctggaagcctccctaaagtgagataggggggccgtttttccctgctctgagccctggagtggtagctcacttaccgccccacctacacccctagaactgcccccaaccacccgtgtgcactccatagcaggacccccagccctgcctcaccctcacagagcaggcttagcccactgttcccctagaggcccccagagcctgggagctcccaccccattggaggggagcaggggagcaggggagccggtgggcagaggagcagggtggcccaggccgggagggtggccaggctcatctaaccctgtgttccctgaggaagctgcgacccacattgtggaatcatcagatcttagcctggtaggggcgatgagctgaggccctgaggtatcagagcttggggttggaatagtggccacccaggcccagcactgtgggcccctcccatctcccccaaggcagaacccagggccatgggaccccttttctgcagacctaggcttgctaccgtgcgaagctgtggggtgagaggtctgtgggacaaggaggcccccggggagcgtgcaggcccgtggggccggggctgaggccagtgtctctggtccacagcccctcacacgtgtccccttgtctcctcatttcttccccctactcagcaaaggcagagagaagaccaagggaggcagagatgacgagcacaagtaggtgtcccaggcgagggcagacgcaacagcgtctctggggagacagaggcctcctccccacaggctgtggagggcgggatgggctcggctgagagggctcaggagtgggctgtcgtggtagagctggcacgggtcatggaggcccagggaggccttttcacctggccacgggggtgagggatgaggaggggttagggtcgcgggggaggtggccagaccttctggtttccactctgggctctcgggggtgaccatcctcctctccgtgtcttgttcctcctccactgttcagcccccatcctgtggccttcgggcttccctgggagggaggggacagctaaaggctaaggggagaggggcatgaggacctcagggatccctctcccaacaggggcgaggtagggccaggcagctggaggcataaggaggaggaactctgggtaccctttgcagctgcaggtcgtgggtggagttggagacccccagaaagcttaggagaggccaccatttgggcggccctctctatcttcatctccccaaaaggcttcctggaaaaatgaggtcagggtgctgtctggagaggacaggagaagggtcctgcaggtgggaggggctggtcacaagggtctggaaagattcgaaggctgggagttgtgaatgggtcttgtaggcacccctagaagcacactgacatctggaggactctagcattacgggatctcataagggcagtggtagccaaggtggaccatactggaggaggcctctggttaacacctgctcttacagatgacaaatctgtctcagaacaggggcagagctggaaccagaagacagggaagctgacttctgacccagagctcaccatagacccaggaaatttagagaacttgactgtatctaaatttaatctaattctccaaacataccaatgagagctgaaaagccaggagtgtggtcttttttatcttccagataagcaacctgagccccagagatcttaagagatttgctcaaaactgtggcctcaatatattaagaattagttcatctgaagatatcatggaaatatcaggattgtgtgttgaggggtctgaactgatcaacactggtgtgggcttgggatatccactggcattaagatcctggggaactcacagcctcattcattgcttcaaaaaaaggtatgagttctaactcgcatttgttacgcacaagcaaaagcaatgatgatgcagtgttaactctgtagtgatggaggaaatggcgctgtgtaggaagagctccagcccagagacctgaaggatggaggagtttgccaggttcccagtaagggaagacacgtaggcagagcatgtgtcaaggctcagagccagggaactgaatccagggtgggtggcgatgatggggaatgctgagctggggagtcctcttagggagtcctcaagggttcaggtttctccatagatgcttagatgtaaagggcatatgaatgagatacaagcagcctgtccatccccagcttctctgcctgagatcagcgatgctctaaggcccttcttgatgcccagcttcccagtctgtcccaggccagacccacagggacacagactggcctgatccctttgactggctacagttggagtaagaggtacctcacagtgccagcacatagtaggtccaccaaaatactggtttcctagcacttctctgtcctaatttcttaccatctctaattagcacatgagataaagtaaactggcatatagtattgttattattattatgtgtagagcaataggactattgaaagaataggaaaatgagatttctaagaagagattgaacaaatttaaactctttagcctggaggagagaaaactgtggagacagatttcaatctctgaaatgttaatgtgtggcaaagctggttggtatctatctccactgagaagagataaatggaaataaatttaagttgaagttaagttgaagtagagaaacaagattcaacccacgaaagaactcatagtgtgtgacattctgggataggctggtttggggagatgagaaaacacccatcatcttccatgatgctgcttgcttgagccttgcaaagggctgggccgccagcaagaactgaagagccagcttccctgacaatcctggggtcaggacaagtgtgtgtgggtcccccaagccttctggtacaacgtgggcacatgtgcaaacgggccagtttggagacagggtggttcttgtataaagggtcagcctatcctgcccacctatggaaagctattcaaaaactaactgacattcaacacactttcaaagacacctgtaaagaccaaaattatgaaattccctgtgccttggggcatggaaaatttttaaaataaacccatttaggggcgcttggataacatgctccgaggttttgaaaattgggctgtttgagcaatgcaaagaaggaccacagaccctatttctcatagacaggagtctttatcctgattgattacctgaggcctgagctaatgagcctagtagttccagttgaagccagtcatggggcagaagccctgggcagtgaatggactcgacctgcagctcatttatggtcaggtctctattagctttcagaataatccagagacctgaattaatgaaacactcgggtcactaaatttagtttggtgaatgttcccaagtcattatgaatactaagctctacctaggaccctgtgtgcaccacacagcaacacgcttctaaatctgggccataaaatgagcggagaaatcatcagatttatagtttacaataagtgaactaattttagcatttttttcctctagagataaataccagtctagattgtaggtgcatttcattctgaccatggtgaatgtagccacaggaaactcaaacggattctaaatcctcagagggtcctgggatactggcctccccttggctctcacttctcaagctttaatacgcccaagaataaggagccatttgattgtaaagtgagttttcactgagttgattattggcttgttttctttgtctgtttctcaccatatcctgtttttggtaattgtagaactcaactagaccaaatgcagaattttactttgaaaacaaaaaaaggccaggacaacggacacctcaacagcaaattacattttttgaaatctaagtctttcagacaaatagataatcttcaaaattccctgattaagttgacatttatttcaaaactctcctttacagtttgccaagagaagtaggcatactgctttctgggaactggtgctgcaatcaggcagaaaggctttttctatagtgaacttctgatgtgttactgatcagaaaattacaaaggctagtggcagtgatgacatcatgctgtactgatcacaattcagattcattgaagagcaagtctaggagaatcagaggtacagagcctgtagtaagaattctggaaattacatccttcactacacatttctgcatttttaataaagggacaaagacaatatccttttgagatattcccaggcacacaggagtgctaccagtactaccacttcagacagctaaaactatgcagggttggaagggagagatttctcctttcaattgcttcaaggtgtagtagagatagttggacaagtatagtttttgtttgtgtgtttgtttgagacagagtctcactctgtcgcccaggctggagtgcagtggtgcgatcgtggctcactgcaacctccgcctcctagttcaagcgattctcctgcctcagcctcccgagtaactgggattacaggcatgtgccaccacacccagctaattttagtagagacggggtttcaccatgttgaccaggctggtcttgaactcctgacctcaagtgatccacctgcctcggcctcccaaagtgctgggattacaggtgtgagtcaccgcaccggaccaggacaagtatagttttttaaagcctcaatcatttctttcaaatctgtttgtgttaagaaataaagtgactttcaaattcaagggccataagtgccccagggatgcctcaggtccttttccacctgggtgagtccatgggaccagcctctgaaagccactatttcttgctaccttgcactccccccgggactcaggcagcagggccagatcccatcccagcaggccgggcagccggcttctccaggcagggcctgcttctaacctaccatctcagagcacttcccctctggggaagtggggaaggggcaggggagagggaagtctgtggctggagcaggctgcaatggcaaaggctaactatgtaggtcacacatgcggaagggccaaggactccaagaataacacagcctaggaatggccaagaagtaatggtgcaaagtcaaacgctgagccctgcaggagactcctgggtaattcaggagagacatagttgagcagcacggctgggcaaaaaggaatcccaagcactgagacaggaagtgacccacgaggaggcccacaaaaactacacttctgaagctgggcctatggcaggggtcaggacagccagcacccctgtccttggggccagcaggtggggcaaaatcccacaggatgcttcagggcaagccagccagggtggtcctttccccaccatcacacgattatttctggtgggttcattgatctgttcaatgttatgtcaccagcaatttaacatgcacagcagtcccttcccaaatgtttgggtgctcaggttctttttgaatgagccccttctttgtaaacatgggtatgatctgtgagattccacagatgacagcatcctgatctgtaaactatgctggcacacagaccatacctgtacctatgggtgccagccctggggccttttagctaaaatcccaaatggtcaggaatggatgggattcttgcccacagaaaagtgcagtcctacggcatcgaggcaaaggacctgagatgcagtaaaaatattgctggcctagaacacaggagctttctgcttcaatcccagttctgccactcaccgtgtgacctcgcgattattgtcccctctctgagcctcagtctttttattggttgaatgaggagaagtatgtggccctcagaggattgccaggaagatgaaatgagcagacatctgcagacattgcagacatctagaaaggcctttggccctatgtagtctctttttggcctgtatgtgtgtgtgtgtgtgtctgtgtgtgtgtgtgtgtgtgtgtaactcacctcccccatcagaagggaggaagcttttgaaaataattccaaaggcatcagctttgattttagagcctctttctttccctttcttctcattgtcgtatttcagatggtatgctactgaagagtgcagacacatcagccttcttccattcctttttaggaattcaaagaacatgctaatgttccctaaattgtgagctgctgccacgtgaaaagggtgattctcaattgctccctcactgggatatgaacgtgctttgtcctgcatatgaacagtaaagaaaggtcctggggttgggatagggccaggtttggggaataagattggccccacaatcctgaggagaggggcttgaggtttctaggtcatctgcctgaggacagaaaggttttccccaacctcctattgcccagcataaagaacaaggatctggggtcttagaaaccatagtcaagcctccacagggagatgtgtgacccaaaaagggtggactctgctgtaagcgagctccaggttggagcctacacctggctccacctggacctacaggatgatggggccatacccaggaggagggagaacgggaagtggagagagtcaggtatccactcatgcaatatggatggggtaatggaacactgcactttaccctctgctgatcctgctcctggggcttcctggtgccaggaaccacaggctcggctgcagggacatcactgaaggacagtgaggacccctgccccttttcctcagccccgctgactgcaaggcccttcacctgggggcacaaggtcgcagcaagccagaggaagaggtaggaactatggagcctgccataagttcctggggttgggggaaaggggaatttggcagtgagaggggacaggtagaaggggcaaaatccaggaccgaagatagatgggaaagggcctatctccccctttttcatggggaccaaggagcatcccagaacacggagaggttggagaaagacaagtcaggctttgagcaccagggccatctgagaactgaacagctcgtttcaaccacatctcccatctcctcatcggcctctgcccctgagtcctctctggtccctgccccgccgttctgatgctctgtctccagtcctcgggctttctctccaaccagctgagccggggaggatgagcgtggggacactggcagggctcggagctctgaggagactagactgaggggctgggatcagactgaaaagtccaagacccagaggagctccagttaaaacggctctttccggctcaagaccacgttccctgcttgctggggaccccatccctctcctccgtgtgtgaaaggatggcaaaggcggaagtggaggggtctctcactgccctgattccccctcctggctcccaatttgggaagacagatcccgatctgtctcgggaccagtaggtgaggggccgggtccatctcccttctctgatgtgttctctcatgtttggctcttctgtgtttgtgtgttttcctccatgcgtccctctccctgcacctcattctggtggcccccctcacagagccgggaggagcgtgttctccgccatgaagctcggcaaaaaccggtctcacaaggaggagccccaaagaccaggtaggacaggtgccgcgtgagccccgcagccccgcgcctcgcggcgccctcccgccgctttccagcccctgcccggctgccaaaaggccctcctgggataggtcgtcccagggccaggccccacccagtgatgcgtggccctctaggaaggagacgccctagggccgagggagggaaacgggcagcgccctctgtcgggggtgcctggttacaaggctcctcccgccctcgttgctcccggttcttccttcttcacgcagaagcccagtgttttaattagagcagagaatatccatcaagaaacgctgtttggccaactccctatttctggggggaaaccgttgtcccactagtacggggtcggcggcaggcctcgcccaagcgctctcaccaggctgcagcctggcctttggggaggtcctggggccgctggagggcgcggcagggccgggcctgggaggctggagcagcaggtggcactgggccctcccggaggagcgactggagaggggaagacagctgctgcagaggaggcgggaggcctggaggaagacaaggggagaaatggagaggacaggggagctgggagggggccatcttctccatcacgggcccaccatcggggctcccggctgccctcccccagcatcccctctgtggcctactggccctcaggctctctcccccaccctcttgcccccatgccaattccagccgtgcccttcaccttcttaaatggagagagtacagctgctggctgaggaccaaacccagcatccttgggtggctgttcggaatccacatgtctgcatctcattagatgaatacacaccaatgcattaggttctgaattccatcagctgtttgatatggataagttacttcctaagccttcgtttctgtacctgtgacatgagaataacgcccatcttggcagggcacagctctaaggactagagatagtcatgtaaagtcctggtgttgtgcctggaacagagagtatccacccaacaaatggtagctatttattgagaggtgcaaaagtatggattctttattccctaccttcttccataagagatattcagtgcctaagtaagtggtatacaataaaagagcattcaattaaaataaaaaggcaagaccagacataatggccattcaaatccaagatcgggattaggtagaaaaacactgcagttattcaggccataatattctaagcggtagcaactaagtaaacctcgaatttaactctcagctttctggatgccagagtaaaaggagaaatggtcactatctcaccatcagtcagcccacctaaccagtctttcatcttccccagatgaaccggcggtgctggagatggaagaccttgaccatctggccattcggctaggagatggactggatcccgactcggtgtctctagcctcagtcacagctctcaccactaatgtctccaacaagcggtgagtggacgggagccctgcaaccccagctgcccccaccctgtcaggcaggacctggcttgccatgattggaatttgggtagggaagaatcagggctcatggacggcttcttcctaacctaaccttacccttttctgcttttccttgggtgtttttctcacctctctccctgcaaaagcagagcacagcagctgcaggcctgttctcaggtccttgaatacctcccagcccaaggaagccacagacctgcccaccccatatttgaacctattgaccccatgtctgtctctctgttacttctgcctttgattagttctctgtgttgaggcctctgaagacaactaatcctcactattcttggcagtgcttgagtgtttaaagaccatgattctgtccctctgcccactcccaggtctaaccactgccagtgtcctcctccccaacaagcagtccccataccccaggcctgatggtacattctcttcctcagatctaagccagacattaagatggagccaagtgctgggcggcccatggattaccaggtaggtgggcacctggaggcctcatgtctttcagactctgctctagtgggggattctagccggatgtgcattatccactatactgaggcatggatccaggggtcatagagaacaacaagctgaatataagttcccaaagtaagcttgttcctgggaggcattcctagaagtatcatcagtagagagatacaaacccaaagaaaagcttgagaactctgcctatgctaatcaaagcccttccagtatttcatgttcagtattggacttcataaagtgagaagcacctagaaaaaccataaagagaccaagaactacaaaaaagtattcaaacagttaaaataagggcctttgaagaaagttttcctggcatgatttttaaattgttgttttgtattatttgattgctggaagtaatgacgattctgtttatctctggatggtgagactgtgagtgatttttttcttctttttgcttctctgtattttctgagattaacacaacttttttatttgtgtgcttctaagaccagagacaaaagactgagacaaagagaggttgacagctgtaagaatgtgaatgtggccaacagtgcaggcaggacaggtgatgagcatgtctggtggctgctgggacaccatctctcaggaagggcccagggaccctccattgctccagaccctcccttggaggctaacaggactcagctataaatcagaagactgctgggctttcctaggattgagttagaatgctggctgctcagaggggacagggcttgcaagagatctcacctggctgccactgcacttctgtcctggggatgttcggtctgggtatcagcaccaggccccagaatcagagtgagccccatctaccagggtagagctttatctctgatgcctagttccagaccccaagcacactaacccttctttacggacaaccccacctcccctcactcaggtgatgatggaaaggataagatggcacttttctatgtaaaaggtacatctggccatgttttctccagaatatacttcatctcccttcatctttgttttagttagtttccatctactcaggcaactgtcttcccaggtgcctgaaaaacagccccaggcaatgtcaaacggacctgcccctgtggttttaaataacttcaagccattggattccttaggggtttgagaatgccggcccctcacctctgccaaaacccaaacacaaagtgtcctgagacttccgagggcttttccaagggattgggctcagggctttgtttctctgtgtgctgagaactggagaattccaaagaacaacgaccccaactcaggtatcatgtcactggcctaagaggtaaggacacatcaaaaatagagtcattattgttcatgaaacttatttttgaaggtttattctatgccaggcactgtgctaggagctatatatgtatttccattgaagttaatgtaattcttcaaccacccaaatataggtgttactgcatttataggtaagaaagtgaggccccaggaaggtcaggaacttgtcccaggtcgttgccactaagttagccaaggttagagccagggttcaaggccaggggtgtctggccatagccataagagcaattgacttctctatatcaagccttctagacagctgctcccttcgggtccctggttcatcttcatcttgctacttagtgcttgttttccaaaccttttcaaactgcctcctaccagagacttttattaactggaccagacattgtcccctccaaagactttttaaaccgaactgaacaaaacggttgttgtatttaacctggtagcatagtgtttcccgacaagttcattcacaattaaccttgcaaacatttgagtgagagctatgaggatgcaaatgtgaaattattttcacttccaatacatacagtgtataatgcaataaaagcaggccgggtgcagtgactcatgcctgtaatcccagcactttcagaggccgagatgagtggattgcaagaccagcctggccaacatggtgaaaccccgtctctactaaaaatacaaaaattagccaggcatggtggtggcgcatacctgtaatcccagctacttgggaggctgaggcaggagaatcacttgaacccagaaagtggaggttgtagtgagtcgagaccgcaccactgcactccaacctgggcaacagagggagaccttgtctcaaaagaaaattaaaaataaataaataaataataaaaagcaataaaaccagatacgacttcactctcttggagactttgggtttgatgagatataaagaccgcaggaaggacacctcgttggtgagatgtggggagacttagctgaactcagatccaggaagggttgtgagggctcaggaccattctaaaggttatggcactgaaagaagcctggaggtaaaaggaccgcggcgtacccatgctctttgtttcttccatttagaatgcacgtcacgtgtaaactctttcctgattattgccatctccaaggcaagaaaccacagtcacccccctgtgaatgtgcagtttccccaccagagtgagcaacgcttggcacttggcagagatgttcttggtggatcaaggggtcttgagtctctttattaccatctcttcctggcaccaagacttaatacattgtcacccaacatctctccagttttcacctccatttcatgcccctgccactgacctgaggtccccagcctcaactgcatggttgtacctactttctacctggtctccctgccctcatattgcctcctccactccaaactccatgccaccactggagcaaacttctgaaaatgcaaatctggtcatgtcacatctctgccacctggaaaagtggggagtgggtaatggatgttgcagaaggacagtactaaagggcgcaccaactctcatctctggctcccagcagatgttcctgaagctggatcaggtccctgggaagcaggtcacaaagcattattactctcgggttttcccaggacaggggtatagatttaccactcagcattattccttgtgatcgctttcatgaagccactggggagtatgtcccttatcttgaaaggagatggtggaatagtcagctggtcagttggtcccagctgtggctccgtttgcctcttcatcttccaccctggaaaaattgagtcctctgctgatgattggagagaaggatggccaagcccctcccccagaaccctggagaatgaccagccattttttattttttatttcaagtgcatcatttccccttcctagagccccaggaggggtgggaggcagcaggaatggcattccccttcccccaacaccatgcgcctggtggtctttctccagcgccctcagcttcctctcggggctgcccttcaaccagcaatgagcaccctctggagcttctcttccctccgttgctccttcaagcctctgcccaccttcccctccaccctccgcctctactgccagagcttctgcccaggttgtcaccttcactggctctgctacatggaggaagggagaaacgtatgaggcctgaaaagggggacagggagaagtagcctgtcttatggccatgcctcgagatggaaaacataaaaaccaaccactctcttggcagtgggaagaggacttgctgctggcttatcttcggtagatgccaaaactatgtctgtccgcttcccagtcctgagttatagaaagccttttttattgttggtgggggcattagttgtggaaaaattcatggggtttttaaaaatctttggcaaaaaagggttcgtggaagttaaaactctacaaactattgtgcaaagaaggacttctagtgtccgtttgctctcttcatagtaaacttctcagagctaagttagttagtcctatttcctttttagctccctgaaggagcagtgaatattgaacttctgtgaagctccagattctaagcttttacttccgtccctttgtcacttcacgttccaaacggaaatgtttgcttcctagttcaagtgtcacttcatttgtaaatatcccctttcctggcaatgttctcattaacattggaatttctatttccttaacatgattacttctgatgtgtagatttttaatcaccctcaggttatttttcagactttgatggacactggatgatcattttagtggttattctttttcatggaaagggaagataattctctcaagtaaagtcgtatttagaagttgcatcaaagcacaactaaaatatgaaatctccaagatgacaggcatgaaaagcaaccttcggagtcgcattagaagaatgtgccgggctcagtggctcacgcctgtaattccagcactttgggaagccaaggcaggtggatcacgagggagactgagaccatcccggccaacatggtgaaacctcgtctctactaaaaatacaaaaattagccgtgcggtggcaggcgcctataatcccagctactcgggaggctgagtctggagaatagcttgaacccgggaggtggaggttgcagtgagcctagatcgtgccactgcactccagccggggcaacagagtgagactctgtctcaaaaaaaaaaaaaaaaaaaaaaaaaaaaaaagaagaatgtacagaggtccatgcttattctagctggggaaaggcttttcttgttaaaacacacgtttgagagaggcaagtgaatcaatcattctaagtatcatgcacaagctccctacttgagagatcaaccgcttagctgaagggagattctgttggggtcactcacattttgtagagctttctgctgtttaggatgcattttgacacacatgatctcatttaacctgcatacaaccttacaggtagctggtgtctctgcttgtaactgaaaaacacaaggctatgtggtcatttgccctcacacctggcaacatgtcaggtctggggttcaatcccaagttcagcaacccccagtacatgcctctgtctatcttaacatggccaccctgacaggaactgacacctccaaatccaaatgagacctgatggcttaaaatgagggttcgggaaaagtagtagtgatgtcaaaaattactggtgctctggctctctctctctctgtctctctctctgtccttatatctttttagcttaaaaagccaataattggctggtcacagtggctcgtgcctgcattcccagcactttgggaggccaaggcaggcagatcacctgaggtcaggagttcaagaccagcctggccaacatggtaaaacccaatctctactaaaaaaaaaatacaaaaattagccgggcggggtggcatatgcttgtaatcccagctacttgggaggctggggcagaagaatcgcttgaacccaggaggtggaggctgcagtgagctgagatcatgccactgcactccaggcctgagtgacagagagagactcagtgtgaaaaaaaaaaaaaagccattaatcatttgtggtaagctccacaaggaagaatttgttgcaatcccacctgtgcctggctccagcaggtttccaggaaacatttgttgcatgaatgaacaactgaaatagggcttcccaggatataagtaagattgcagagctggacgccacataaaggacacagcagagtgcacacaacatacaatcagtaggctgaaaaaggcggctcaggcaggcaccaaagccgcactggccatacaaacaaagaaattcagcaaacaatgtggaaaggggggggagccaaattccagaaatgcaaagacgtatcagaggcctgcaggcttacatgagaattcctggagcaggaaattaaatgcaagttaatgaagactttgaaagctttattcctgagtgcatgaaacctgtgacatgggtttggcagctctttctgaagcagagccatcgacgctggggaagaacgcagggcacttggcatcacctaggagctttaaaaatacagattccagcctgggcacggtggctcatgcctgtaattccagcactttgggaggccgaggcagacagatcacttgaggccgggagtttgagaacagcctggccaacatggcaaaaccccatctgtataaaaaagacaaaaattagcccggtgtggtagtgcatgcctgtaatcccagctactcaggaggctgaggcagaagaatcacttgaacccaggaggcagagggttgcagtgagccgagatcatgccactgcactccagcctgggcaacagagtaagactccatcaaaaaaataaaaatacagatgcctgagctgcatgtccaggattggattggattggtctggaggtggcctgggcatcagtgtttttaatgcctctccctcccttcggcccagcaagttaagtctagtgaacactgacttagaggttagccaactcatactcctctataaatgaagacacttgaggcatagaaggagaaagagccaggatcacccagcagatgagaggcagtggtcagaatggagcccaggaggccagtgctggctcccgggccctccctctgaccctgctgccccagcccctggacccctgcgggaccaggctcctaggctcaggcagctttccttctggctcccccttctcctgcctgcaggtcagcatcacggtgatcgaggcccggcagctggtgggcttgaacatggaccctgtggtgtgcgtggaggtgggtgacgacaagaagtacacatccatgaaggagtccactaactgcccctattacaacgaggtcagtggccctgtggggaaaggagcctctgtaaatatggcaggagggtggccccagccctccccaggagaaataggagtggctggaagtcaaggagcacacagggctaccagcaggggtgatccaccctgttacaacccccaggacactgacaaacagagccacatcttctgaatcctctgaaccccccagtctagagcacaggccgacactggtctttgaagcgtacaccacccgggtgctcctgggcagaccccagcagtgcctgtgaaagaacccccccccaccccactccccaagaggcctggttcccactgtttcccaggccagagcccaaggacagggctgcctcattccaacccatggtggcactggcaccattagtaagcactttctaccagccaggcatgctcctaaatgcttctgaactggaccatccaaagttgtcactatcaattcccttttacacaaggggacagtgagacttctgaaggcagaccttgtccaacctcacagtgccagcatcgcccttggcgtgctagtggggttctgccctcttggctcggctccttcatggttgcctaaacttctgcgggcttctctccagagcactggccttgattttagggtgtgaaagagaaaacatttggtacccactcctattctttccagccatttgaggccacatcaagggtgagggacctcagagaccttctactttaatctccccatcttacagaggaggatactgaggcctccatatggaagggccttgcccacaatctcagagagtgttgctgatagagcaggggccaggctgcccacccagcttccagcccagggctctggccaccatcacaaatatggcaccttggttcccaggctccagatgggaccccatcataatcagctctggggagggatgtgagaaatagagaaatacactcactcatcaaaacccaaagaatgacttagaggcatgaagaacagcgaaagtgagacttttaataacggtcttgcaagatggagtgtctggtaggcaggcacccctggggcagtcacaacaggaatttatctcctagtgtgcaagtccctcccccacttccccattggttgagcactatggggttacaatcttccctgacgtcgcctaagtttcattttcccccttacaaggttataccccgctccccttcgatttccccacttaagtttcgatttcccaataacaaaactttcttccctttcatgggctgacccctcctctacattctgttcgcttattgtgtccttctaggtgcatgagccgtgtggtttgttgcattcgcaggttggatgccagtacttagacttatcctgccttgaaaatggaccattgaaaatgttttctcaccaggatgcccaggcctttcccagatgcctgatcacacatcagactaacccagaagccacaggcctgggccctgccatccctttcctggagggttccccagtctgtttctcctggtggctccaggcagtgaggggtgccaggctgtcccaagtaaggcagctgagtcccgtaccctgaggtgggtgagggctgaggtgccccctgtagcttgggggagggcatttctcaggcagctctgagagtcctcagactgtgcacctgcaggaagaaaacccaggcccacctctgcccttcagcccaggcctggccgaactctcctttgtgaccacaaattgactctgctctcccagctgctttcccacaggccccccgagctggacaacctgctcaggacccctccagccccaaggacattcaggattgacatctctggccttacgttaggacacatcctgactggacaagtctccgcctagataagcatctatgtccccaagacaggcatggagacaggtccctgtggccccggtggttacttgatagcagtgaagccacttctgctaacttaagggatctccctccaccaggcccacacaccttggctttcattcaaattacttcctctttcccaagggcacagagctgctctccctactctgtggctcccccagaaaactcctactcacccggcagggcccagctcaaatgttcttgctactgagcagccttgcctgctctgtctgggtcagaggtcagcactcccctttctctgcagtgttaatgtcctggagttgaggttggtcctccgtgtctctgtcctgctggtggactggaggctcccagtctcctgcctcgctatttgttcagagccaggcatgtactcggaggggttcagtaacactcacccaaaggaagacacaaacatccactgagcatctgccgcacaccagacagtggcacgtggggcaacatggaggctgccgagatgaaggaggcacagtttccgccctgcgcaggtcccctccttgtttcagcctagaatctttctaaattccctatttacttcctctaagactgactattcattctgctcatctttggacaatcttaaatgtgtttctgatcacatttttgttctttttcacaaacccaaatagctctgattttgtttctgtttcctctaaactagggtttctcaaactcagcactatggtatcttggactggataattgtggtgggatcgtcctgtgctgtgtaggatgtgagcagcatccctggcctctacccagtagatgccaatagcaactccccttagttacagctaccaagtttccagacatgccaaatgtcccctgaaatcgccctcagttgagaccaccattctaaactatcttactatgattccttccagccccaaatcagcctttccagccccaaagctttgtttcccttttcttctctttctatgccacattccttttcaatgaaggacatcctcctcgtcgtgggaatgtattatttctgactaattatctgagctggtaggaaccttcctttggctccattaaaacaacagagggaggtgggaacaatcaacatgacttaggtatctaagctattacaaaaggaaaatatgctcaggaaataacaggaatttgattgcagacagctcagagagttcgggattctggctctagctcagctagctcgctcccctggggctggcacatctgcgggcacctggcctgatcaccctgcctggccctgagcctgcctgtgtgcagggaagctcaaaacctttgcccttccggaacaagctggccattcacaaaccagactaaggctcctttcctgtgtgtcctgtgtgtgcatctggccccgccctgggcatcttgggagcgccaccatccttcctcctgctgaaaatccacctctcccctttgccttggatccttctctttctacagctcaaagaacctggcattgcacagcccaactctgtctttgtttttcttccagccccttcttccttgcctataaggtgttctactccagcatatgctaagtacaaccatgaagacccatgtgtgctcaaggacaggaactaggagtctgtcacctctctctgggcctttcctcattcccacacacttctccagtgacctcctttttccctccacccctccacagtcagaccacttgggttgtcctcacttcctccccccagtcacccctcaatctctgcagggtttctgcctccagatgtcattgacactgctctcctcaaggtcaccaaggacattgctgttcctgagtataatgtccatgtcatcctcctctcccttgatcacccagtttctttcatcccgctgcctgctgctcctcttgggggcccctcacgccactctcctgcttcccctgtctctccagctccatctccccggcctaacttcttggctgaaaggctgtgtcttcttggagccctgacctgggcctgcttcccctcccatgctctccccaggtatctcctccatctccaaggtgtcagttaccatcttgtgctgacgattcccaaatccatatccccacccgcctccccagagcttcagaactctggccagcacaccctgggcctgttagtgtcatgcacagctgtcgctgcttgctatgtgcttaccgtggtgcacacctgtgttaaagacttgaccagggtgtctcattgcaacttcacaaccacaccttgaagccccccaagtgaatggcacccctggagcagttcagcacgacagccctggatcatatctccacattcataggataataggtaaactgaggctcaggcaagaaagtgagtgatctagcagtaacagccaggtggggctggctctgaagctggctttaccctcagtgctcaagggccagcccccagcagccaggagcacgttctcttcggacatttaccccaagcacattggaaatatttctcccttctcccccaccacagttcaccaaagcagcagcccctctactcactgccccacaccctcatcctcagcacctgcacacccaggccaggggaagagatggggactgcaaatgtgcatggcagcccacagcaccaaaggacagtgcacacccatggcatttcacatcgactgccaactaagtgcttggcacaccatggttcatctgctctgaggcttgcgttattttacagtttcacctctctgaatttgggatgtgtctcctaggcagccttgtggcttcatggcaatgtccatgtggcttattaaaccgtagtatatcttacagccagtagccactttagatttggtaaaatatgttacactgtctcatcagagcctcataacaagactctgaggtgggtgtcattatccccatttcacagctcaaaaaactgaggttcagagaatgtgttgctcaaggccacacagttaagaaggtgcagagcggggactagaacccaggtctgcttgctccctggccctgtgcctcttctgagcacagtacaagggcatgggctgtcccacctactgttccaagttcctttcccaccccacactagccagcaccagccccacctaggggatggggctctgcttcctaccacccaccaccagggtcaatcaggatcagatgagttgcctctgctgctcctctgaactttggggctcagggcaaatgtctggggtgcagacaggccctgcgaggagggaggggcccaacactgcctgggctgttgctgctgccctcagtgacagcaggcctggatccttccccctccagtacttcgtcttcgacttccatgtctctccggatgtcatgtttgacaagatcatcaagatttcggtgagtggggagcagcccctggccggcagggccactccctcaaactgcacctttgtgcagacttgagaggggccccctctgtctagacccatgataaagaggcagcgccgtgcctggacacacggctgggcaagtagggacaggctggattctggcccccacccacccctttcattggatgcctctgaatagtgcattcgcccgtaaacagtggccagcaagaaactggcgtgggcaggaggagctgatgctgagcctcagtgagccaccccactctgccaacgccctcccacttcaccacaaagctcgggtcccaccactgccccatggaaagcctcacccttgctgggcctgacgggtgggctgtggttctgcctgaaaggtgattcactccaagaacctgctgcgcagtggcaccctggtgggctccttcaaaatggacgtgggaaccgtgtactcgcagccaggtgagtacctgcgcatggccagtcagtcgaggtgtgcatggctcagggagcgtggtgcacggggcccttcccactgtggcagttcctgggaaaaggctggcaaggaccacagtctggcgactgttagtacacacagccatctggcctgcggagaagtggcgcgcacagtctgtacacaaatgcagtgagcaactgcgcacccagtctggtgggttctcactcataattaggtgagtaactctgcacagagcctggaaggagcttcatcacacgctctggagtgcatggcaggctggtgcatcactggccataggcaggctgaccagtagtggtagaggatgcggtgagggagacccgtcacagcctgcagagaggctgcgcccagactcctgcctcctgggctggcacctgctgagcagaaaagaacccctttccacccctcacaggaccctgccgtccccttttacagttgaggctcagagccagggcttgccccagccacacagctggccgggggtgaagtcaggctgtgtgtccccagagcctcactgagccacactatccaatctgaaagcggtgatgctggtcaatgccagatgtagtgcggcggcctctgagggactctggtctctgaaaacacttcttacaagagccccaggcttttgggcagccatgtgtgctccgtggcgtcctgtagggtaacagcaatggtgttggcaagggaaccccaaggggtggcccagagggcttgtgaggtgggccaggcagaggaagtgcctcagcctgccagatgacagctcaccacgtgggcaggttagggaccaccctgtgtccctgaagtgaatgcactgctcagagtgctgtaatgaccccattaggcgctttgacagtgagaacataatttcacccaattgtcacattgggccctcacaaaacagtaatgtaggcagcagcatttcttcccattttgcacatgagataaatgaggctaagagaaatgaaggggcttagagataccactaaactagtaggttgaacaaattggcgatcgcttgtggttcaacctaagagacgtccagctggtgcacattacaactatgacttagaccagggaatctgagtccaaaaccaagattatacacataaaaatcacaagatcatagaacactcaagctgcccaagacctgaaaaacatctagtccagcctctgtgaagataaactgaagcccaaggtgatgaaggggtttgtccaccatctaggagtagcacccctgtctccagctcccaggccagtgcctttgccaccaccccacacatgccatagccctcagcggagggcagccctgctgaccatcagtgccatggggagcagggaagagtcggcctcctgccatgttgctttccaggaagcatgcatagccgtggactacttgcttggaatgactggcatccctgaggataagctcctcccagggctgagcagtggccctggtaccactggcaggcctgaggccgagagccaagagaaagtcagggggtggagaaaaaggcagatattagtctaatatggacctctgggcttctgggtagtaaagtcctggtgaggaaaccaccagggcatcagtaagtgccagatgttgggctaagctcactgtcccagcaggcctcaccctcacgaccccatataggcatcattcccatttcaccataaggaaactgaggctcagcaggcttaaacagctggtccagggccacattgtgagtaagcggcagaaacaggatgtgggccgaggtctccacttgggtaacctagctcgagatttgctgcttctgctgaatccagccctgagcctggtgccctcccagggacaggagagcctgaagtcacatgggtcctggagttgagacccaatgtctttactctgatatctccagtttggcctgaacttcttgatgagtcgttggttccagccagggcattgttggacagcatgctcccagagacactcctgggtgctgctgggaagctttgggtggtgtcgatatctcttggaactggaaggggtttcccgagagaacctcttctcaccctggcaggaccacattttgtcatttgtaccaccagatgcaacatcaggaaactgtttactgtttgctactctctgttgggggtgaggacgggccatacactcatcctcatagatcatagaggaagtcaggggcatacactcatcctcatagatcataaaggaggtctgggatgcagcaacttccccagctgggctacccttgactggcaggtgtcagccccaggctgaagggaggtgaaatgatgtttcaggctggtaagcatatagctcaggatctcatgtggtccttgtatctctagcctgagatcacacagtattaggactagaagggcctcagaagtcatgagtcaagtgttaacctgatgtagggacccccacagcaccatctctgattggtcctctaaccttgcttagtcctcccagaaatggggcactcactacttcttattttagatatcttcactttctttaggtcatctcaaaatctgtcaccctgtaaccttcacccactttcacacgtctctctttcaggacaaaaagaaaaatagcctttaaatttgaaggtaaattttacattcctcctgaaccgtattctctttctttgctaaatgtccccaattcatctaaccatgcacacctctatacatctacccctgtatccatccatccactcacccacccatctacaaatccatccacccacctgtccacagatccacccacccatccatgtatccatccattcacgcaccaatccatatatccattggtccacccacccacccatccgtgaatccatccacccacccacccgcctgtctacagatccacccactcacccatatatccatccatccacccacccacccatccatatatctacccacccatctatccacagatccatccacctacccacccatccacagatccacccacccatatatccacccatccacccacccatccatatatctacccacccacctgtccacagattaatggctccttctatccagtaatccattcaccatctgtccgtctatctctcagccggccaggcagctcaccacccatccctctgcccatttatgcacccattcattgagctttctgtccatctcctcatccgacacacatctgctctggcaagacctgaagctcctgggattcctgggacatggcccctccctggaggcctgccagcctggctgaggttctccagtgactcctcatccacgtgccttcctgccctctcaccttgcttgtccctctcttcagactctactgtggcattatcttttctgagacacaggtggcctggctattcccagaaaggccaacctctgtacacagcccctaacatctccgggagcccaccagggccacaggcttgcaggacacaggcctgggctacggtagaaggtggaagaggagggagtgaaggagggaggtgctgagtccctgagagttcagtgcccacctaacatcccgggaagcagattcctaaggcacagtgatgcgcttccctttgcttgcccactgggcttaaagtaaacctgaaggggcaaatccttcctaaagcgcctccttccctgacatccgtcctttcctccacacagtcataggtcatgggacactgggatgagactgacaatccctgtctttaggagactctcagtctaaaatcagagccaaacaatacccagatcagcacagtgagatgggaggtgtgcatggagagcacagagaacaaacactaaagagcccaggatcaactcttccgaggaagtcagggagggctgcatggaggaggagagacttgagcaaaatgagtagaagtttacaaattgaatagggagaaagacaggtggaggtggagagaacaggaatgagggcattccaagctcaaagagcagcagatgcaaaggcatggaggtataaaagggcatataaaaccgcaacacctgttcagcaaggaggaacacagggctgggtgggctcagcagagtgagtcagggagcactaaatcaggagcctgcaggccatgccttttgtcttcaccccaaggcactgggaagccccagaggggctgaagatggggagcaggagcatgagcctccacctgggaaggccctgtgtgcagctgtgtccttcacagctatgtgaaggctggctgactggggtggggccatagaagaggccacaggcagaaaaacccaattaggaggaggctgtcgtgcttccaagtcacaccactcatgggatatatgtccatgggcaggccatgcacccactgccccagctccagaggacctcagactctatcacaccctgggctagggacaggcagagctgtggccccaggtcccgggactctagggaccaagacagcatttggttctgccaccccttggcctgccctgagcactgggagacgctctgggtgggggtgtctggtgcagtgcccacccctcatcattgcagagcaccagttccatcacaagtgggccatcctgtctgaccccgatgacatctcctcggggctgaagggctacgtgaagtgtgacgttgccgtggtgggcaaaggggacaacatcaagacgccccacaaggccaatgagaccgacgaagatgacattgaggggtgaggcccagctaccccagcccctggagtctgagccagcccttccttcccccagggagcccccggtgagggtttgctgagagcacctgccacccgtctccctcaccctgctctcgctcactctcccaagcagccccactcttccgaggcagggcaggggcagggggtgatggaggatggctgagaatatcagtcctttgacatcctttctgccagtgagaaatgggttgagaagagtcgatgctggcagaccagaaccagcagctgctgggtcctgagtatagcagcaggaagtgctgggagagccaaggtttcttctggtgtgccaattccaggcagctgatagcagctgttgagaaatattctgtgaccttgtctggagtcagtgggtaaaagtgctgggaatcaatgaatcctgtcttttgtgagctgggggagagagagtggctactgtgaagtttttgtctacgaaacaaaagatacggcacaaaactataaaacactgacaataatactaagatcatatcccaatgtacaatctacaaagcactcatatgttttagcgtgcttgagccgatcatgttcttgggaggtgggtattattacagccacctcaacagtgaggaaacggcagctcagtgagatgggaagatttgcccagaatcccacaaggggcaagttccgtgaacacaagtgtctaatcctagccttgctccctcagctgtcccttagagactgtgccaggacccaggagtgtgtagatgccaggatgggggttggggacctggacctggtgaccatggccctggctgtatgtgctggcaggaacttgctgctccccgagggggtgccccccgaacgccagtgggcccggttctatgtgaaaatttaccgagcagaggggctgccccgtatgaacacaagcctcatggccaatgtaaagaaggctttcatcggtgaaaacaaggacctcgtggacccctacgtgcaagtcttctttgctggccagaaggtactggggtatgaggtacaggaggctggggctgggtgacaggtatcacaagggcaggctgatgggtgtggggcctggggcagctgggcaggtaagacaaggctggaaatcatgttggccagggacggacttagaggatcctcactgcctcctggagtccttagactgagagctgcgcagggggcatgagagggaggagaggctgggggtgtgggaagagtggagacaagtccacacacaggcacgcacacacacatgcacccactcatacacgcacgcataccaactcacacacgcacgcataccaactcacacatgcagacacgcacccactcacccgtgcacacgtgcacccacgaatacacacacacatgcacccattcacacacgcacacacacccactcacacatgcacacatgcacccactcacacacgcacacacacccattcacacatgcacacatgcacccactcacacacgcacgcatacccactcacacgtgcacacatgcacccacgaatacatacatgcacccactcacacgcacacatgcacccattaacacacgcacacatgcaaccactcacacacgcacacatgcatccactcacgcacacatgcacccactcacgcacacatgcacccactcatacacacacatgcatccactcacacacgcacgcgcacccactcacacatgcacccactcacacacgcacacatgcatccactcacacacgcatgcacacccactcacacatgcacacatgtgcccactcacgcacacatgcgcccactcacacacacacacatgcacccactcacacacacatgccacgccctcacctgtgctcccccttccaccagggcaagacttcagtgcagaagagcagctatgagcccctgtggaatgagcaggtcgtctttacagacctcttccccccactctgcaaacgcatgaaggtgcagatccgagactcggacaaggtcaacgacgtggccatcggcacccacttcattgacctgcgcaagatttctaatgacggagacaaaggtcagcagcgggagacccggtgtgctggggggcagagggagtggcctgaagggaaggaatatgtgagatgccctctcttcacaccaccgtcatcagctctggtcctcagcctcacaggtgcttccagggccttgccagcagcccctgcctcagggggagggtgaggatttgtggctcaggtcggctcagagctggcctgagcccagctgactggatttgtcagctagtagttgtgtgacctgttttcccatttgtaaagtgaaaataataatgattatatgatatgataattatagtatgatatgcacattatagcagtgtatatactgcatttgtatataattacagtgtgtgtgtatatatatatgatacctaatagtagtgcctatctgcagaatcgcagggattgactacctcctaggatccctgccctgtgctgggttccaaggacatagagtgagataagaatctattcctggatcaaagtgctcactgtgtattgaggagatagatgtgctaccaaatggtcaaaacataaggcagaagacacaaaaggccacatgttgtctgatccatgtatgtgaaacatccggcaaatccacagagacagaaagtagattgccggtttccaggtgctaaagggaggggattgggactaactgctaaataggtgcagagtttcttttgagggggtggaactgctctggaagtagatgatggtttatagcacagtgaatatacgaaaaaccactgaaatgtacactttaaaagggtgaattttatgtcatgtgaagtatatctaaatttttaaaatgctataagtgtgttttttaaaaaaaggcagaataaaaaggaaatgaaccaaaaaaactggatcatgagacccctgtcagaggcctgacaaatcttagccataagagaagggacttgtgcctaggaattgggaaggcttcgtgaggaagcagcatttcacaggcagagatggagagggatggccttcagcaaggaggggaggggtctgcactggcagggtcaccgtggtgggacagagctgcaaaaatggcacagggcccaaggtcatgctgcggacttggaaggactggctctgtcctacaagtagactgttgacaattcctgctctaagttccaggaagcagggagctagactttgccttcccactgcttccagctcaggcccccgcagggaagaaatagacccaagagagtgctccaccccagcgcagtgtaagaaggctgccccacacctgaatggcacacatgaagttctcagctcagcacccaggagctggaggccagggacccccaaaagaggcccctcttccccagggaaactggatgtgacgctgccccctcatttttgttcccactgccacaggcttcctgcccacactgggcccagcctgggtgaacatgtacggctccacacgtaactacacgctgctggatgagcatcaggacctgaacgagggcctgggggagggtgtgtccttccgggcccggctcctgctgggcctggctgtggagatcgtagacacctccaaccctgagctcaccagctccacagaggtgcaggtggagcaggccacgcccatctcggaggtgagaccccaggcactgtgctgtcccccagggcctccagctcagcccccttctccctgagtcacctgggtcccaggctttgcctgttgctgccctgtctacctgaggagtcatacctcaggataaggcttctccccaggaagcagaggcccccactcagccccgcaacaggactctgccctcgtccactgcctgcctgtgctctgtctcacaacggccgccaggtctcacgatggtgcctcccctctgcccctcttcccagccacggctgtccctgtggtgtctgcagccagccctgcttccatggatatccaggctggggggccgttggggtgtgggctgcctggccccaaagccgggtgggatgcccccaccatccacccccacggcctgtctgtgagacggaaggaggcctggcccccgacctgccacccttactcaagctcaggaacgctttgaactgcctccccacagagctgtgcaggtaaaatggaagaattctttctctttggagccttcctggaggcctcaatgatcgaccggagaaacggagacaagcccatcacctttgaggtcaccataggtgagtgctgggcccacgggggcttcgggcctaggtgagtgctgggcccacgggggcttcaggcctaggctgcaggtggtaagtgtgaggctctgcacctcagccctgtcctcactcttgtagggaacgttgacccctttcccctgagaggcctcaagcacccacaaaacacctttgtgtgtgcatggggtggaccacgccccataaaggggccaaccctcagctccacctacagggtgaggctgtgtttgggacctggggcagagggcagggagaagcccttcccggggctggagaggagagagtgggaactcaggccacagcctgggccagggctgggcctcgcactcaggcgtcatgaggactccctgactctcagcggagtggggacacgggctaatgctctctggctaatgatgtgtcacgtctgagccccattccctgactctccctctcccctttcccaaacccaaggcagcaccggattggacggtgggaggggcctggtggggaatgcactctaggccttctgggcccattctgctccaggcaactatgggaacgaagttgatggcctgtcccggccccagcggcctcggccccggaaggagccgggggatgaggaagaagtagacctgattcagaacgcaagtgatgacgaggccggtgatgccggggacctggcctcagtctcctccactccaccaatgcggccccaggtcaccgacaggtgggcccagcctcccatcctcctgtggcctggccctcccacctccctgggcccccaagacctcacctcccgcctctgcccaccccaggaactacttccatctgccctacctggagcgaaagccctgcatctacatcaagagctggtggccggaccagcgccgccgcctctacaatgccaacatcatggaccacattgccgacaagctggtcagggccaggccaggggccagcaggggtggggtcctgggggagacggcgctgtcagagggccttccctggaacacacaaagctggtctgcccagggggctgcaggaacggccccagcaggacctctgttcccattctcagccccaggtcccagggcacagacaaggacaggagccacctctagtcactcagcctccagtgaatcctggggcaggagtgttgggttccctgatttttccagaaatcttaaaagcaaggctagggagacaggtgtggtggctcacgcctgtaatcccaacactttgggaggccaaggcaggtggatcacctgaggtcaggagttcgagaccatcctggccaacatagtgaaatgccgtctctactaaaaatgcaaaaattagcggggcttggtggcgggcacctgtaatcccagctattcgggaggctgaagcaggagaatcgcttgaacccgtgaggcggagtttgcagtgagccaagatggcgccactgcactccagcctgggcaaccgagcaaaacttcatctcaaaaaataaaataaaataaaataaaacaaaataaaaaagcaaggctagggaagggaaatggggaaaagggagaagcgagcagtgtctgaagctcaggagctgccccctcctcctctgcccacccctctccccccatgagccatgggcactgactgggcgaggagtgcagctgttggcatgagacctccttctccccagcctggggaagcagggaccagcagataatcccgcccttccctgagctgttgctgttccctgttgaagttccctgaagctcagccagctcatattttataaaaatgaattaaaacctccaaaaaaatcaaggctaatatgaggtctgctcccagccccctgccaatgtcctccttgtcatccctgtcttgtgactataaccacaattaaagcccatagcctttgcagtgtgacctgggtctgcagttatctgcaaggcttccccctaaggagctggggtacaagctgacctgtgtttcctgtgggacctgggtctcacagccctcccagtgctctcagagccagagccactccctcttcccccaggcatctgttcccatcccctgccacaggctccagcattctggagtgacgtcaggatcttggcacatccagtcctagggtttccctctgtctctggccagccctgagccccgtagccgtgagttctgcccaggccctgtgagctcaccagagccacagactcacagcccagaggtggcttcttccttcaggaactgaagaacccccatgaacaccaacatctccaggttctgagaacagaacctgggaaattgatgacttcctcatgatgaccgatactcaggatggccctagcgagagctcccagatcatgaggtccctcactcccctgatcaacagggaggaggcatttggggaggctggggaggcggggctgtggcccagcatcacccacactcctgattcacaggaagaaggcctgaacgacatacaggagatgatcaaaacggagaagtcctaccctgagcgtcgcctgcggggcgtcctggaggagctgagctgtggctgctggtgagaagggaggggcggcaggtggggggaggatgaggcggaactggacaaaggggaccctgccagggctgggcagatgaggaagaatctacagagcccctgctggtcaggctcgctaaaccccggctcgccctacccccagccgcttcctctccctcgctgacaaggaccagggccactcatcccgcaccaggcttgaccgggagcgcctcaagtcctgcatgagggagctggtgaggacgcaactggacggcgggggctggagggagggcctggttgtgagaaggtgtcacaaccccctttgtcatggcccgagctgtcccccagttgctgggttcactgacaccccctccttcgcaggaaaacatggggcagcaggccaggatgctgcgggcccaggtgaagcggcacacggtgcgggacaagctgaggctgtgccagaacttcctgcagaagctgcgcttcctggcggacgaggtgcggcccaaggggtcggggctttgcctcatccagggctggctctctggggcccctcaggatcagggggctcaatcaggaggctagacccccttacccactgcccctggccaccccccaacccccagccccagcacagcattcccgacatcttcatctggatgatgagcaacaacaagcgtgtcgcctatgcccgtgtgccctccaaggacctgctcttctccatcgtggaggaggagactggcaaggactgcgccaaggtcaagacgctcttccttaaggtgctggagggggcaggatggatgggggcctgggtcctttcaggggagcagcagcccccacctggggctggaagcctgagtgacagggtggggccttcaagcagcaggtgctcagagaagagccaagaatgggaaggacgtgggggaaggggtggggaaggaggtgggggaaggggtgggggaaggggtggggaaggaggtgggggaaggggtgggggaaggggtgggggaaggggtggggaaggaggtgggggaaggggtgggggaaggggtggggaaggaggtgggggaaggggtgagggaaggggtgggggaaggggtggggaaggaggtgggggaaggggtggggaaggaggtgggggaaggggtggggaaggaggtgggggaaggggtggggaagggggcatgacggccccctgcccatcctcctgcctccaccggaccccagcccagcgggatggctgtgaaggggcagggcagctctgaccagggcctctgccggcccctgccccttccccacctcttgggccctggcagccgtcaggctcctggtgaccccatgcccacccccagctgccagggaagcggggcttcggctcggcaggctggacagtgcaggccaaggtggagctgtacctgtggctgggcctcagcaaacagcgcaaggagttcctgtgcggcctgccctgtggcttccaggaggtcaaggcagcccagggcctgggcctgcatgccttcccacccgtcagcctggtctacaccagtgagtgaggacccctcactcgaagcctcacctgggagggggccggaggggctgcccatcctggaacctcaggctgcccttccccacagagaagcaggcgttccagctccgagcgcacatgtaccaggcccgcagcctctttgccgccgacagcagcggactctcagacccctttgcccgcgtcttcttcatcaatcagagtcagtgcacagaggtgagggcctgggaggagggagtggctctggctttgagagcaccagaagcctgtgagcctgtggggactggagcctgtggggcctgtgagcctgtggggcctggagccacaggtcagccagtgccccggtttctcaggggaagccctgcagataactgcagcagacgcgggtcacactggaaaggctacgggctttagctgtggttatattcacaagacagggacgacaaggaggacattggcagggggcttgggccaaacctcatattagccttgattttaagatttctggaagaatcaagacacctgtcactcctgcccccaggttccgtggaagctgagtgagtaggggtggcttctgtttgtgcatctgcccccccctctgtcacttgtcccctgtctccccatcccatgctgcaggtgctgaatgagaccctgtgtcccacctgggaccagatgctggtgttcgacaacctggagctctatggtgaagctcatgagctgagggacgatccgcccatcattgtcattgaaatctatgaccaggattccatggtatgggtgggctctggtgccagggaccccagcagcaccacacctggcccttgttccctgcactccacctgcgctgaggctgtgccctcacctccgccacccacctgcagagctccttggccaggtgctggctgggaagctgggagtgggggctgacatctagctcctcctgcctgcttgcggcagcctgaccccttcccaggccagcacatcctcacctcctgtctcctacagactgagccctggaggtgtgccagcaagtcctgctgtcactagcctccccaccccagggctccccgacccctgccctcacctaccacaaccagtaacagccttgccatcctccgtggaggttctggagcagggagtaagggattggggtgacccccgagagttagcgagccaccttctcacataccacctcagctgctgaggtgcccagatagccctggactagaggtaggaggacctcatgtctagtcctgagccgggcatctgccatttactgactgcttggccttgaacaagtctttggtgggccctgagacttggtttcctcatctgtaaaatggggtgatcacacctgtcccttacaacaactcatggcgctgtggtaaggaccaaacgagatcacaggtgtggacagcaagcaccaagaggcttctgggttgtctgttgcgtcagggcaaagctgacttcatgggccggaccttcgccaaacccctggtgaagatggcagacgaggcgtactgcccaccccgcttcccacctcagctcgagtactaccagatctaccgtggcaacgccacagctggagacctgctggcggccttcgagctgctgcaggtgggactgcagggaagaggggctgaggcctggggactggaggctgggagttggggcctagggctgggggctggaccctgaaggctggggcctggggtctggggcctgggggtggggcctgggggctggaggctggggcctggggctgggggctggggctgagggctggggcctggggcctggggggttagggcctgggcgttaggtcctgggggttggggcctggagctggggcctgggggctggggcctaggggcctctctcctacccatcctgaccaaagctgggggcgtggtccttagggggtttccctgtctccccagatcatggcaaacaactcatggggaaagagaccctgtccctgggctccccagtgtgtgacctgtgacccccattccccagattggaccagcagggaaggctgacctgccccccatcaatggcccggtggacgtggaccgaggtcccatcatgcccgtgcccatgggcatccggcccgtgctcagcaagtaccgagtggaggtgcgagggctctgtgtggcccttcccttttggatgaggagtctgaggacccaggaggggaagtggcttgtcatccccctcccaccaccatcaccaggagccagcagcagacccaggctcctgccccagcccagggcctgcccccatctgcaccaagtcgcactcccatgtcccaggaccatgcccagccctcctgtctgcacccctgaccctgcaccccttctccgggcagccccaccctcatccctggagaacgcctgcccctcctctgctctcctggccctgctcccaccctttgaaatctggggtgaactactgcccatcccactgcccggttccctattggatggtccagcacccccatggctggctcccttgactaaggggctctcttctctgcacccaccctccaacctctcccaggtgctgttctggggcctacgggacctaaagcgggtgaacctggcccaggtggaccggccacgggtggacatcgagtgtgcagggaagggggtgcagtcgtccctgatccacaattataagaagaaccccaacttcaacaccctcgtcaagtggtttgaagtggtgagtgcaggccctggcggaggacatcctgtggccagtgtggctccactcagccagccggcttcctctgccccttcttggaggctcaggctcctgtcgccaacaccccaggacctcccagagaacgagctgctgcacccgcccttgaacatccgtgtggtggactgccgggccttcggtcgctacacactggtgggctcccatgccgtcagctccctgcgacgcttcatctaccggcccccagaccgctcggcccccagctggaacaccacgggtatggccacatccaccctgccaccaagcctggctccacgccccccagggaagggctccaggtctccgcccagtccaagccgcgaccagagtttgctctttggggccgagggggtgggcatagaagaaggtcaccctggtggccaaggaaggctgcccaaggtgacgccagctctacagccagagagggcagaactggagacagcctgggggggcctgagggcagaaagccccttgcgctggttgatggagaagacccaggcctccccgccacctccctcccaccggcctccgcagcttccccttatctcgggctctcttcttccctccccatgcccatattttctcccttgactgcctgtccccctctccctcagaaagttccagaatcagctttagttctccgcaccttcctgccccgccaatctcactgttcctcttgctccttcctctgcctgtctgtccatctatccatctgtccagtcaggcttctccggcgctgccgtgtgctgtgcaatgggggctcctcctctcactccacaggggaggttgtggtgactatggagccagaggtacccatcaagaaactggagaccatggtgaagctggacgcggtaaggcgggtggggtcagccccctgctggctgggaacatgcaacttcgtgtgacacatcctgtgaaccagactatctgccccgagagaaaaggacactaagagcctcctttggcatgtgactgtcgggggctgagcttgattgtgtgtccaaacagctccctcctaatactatcctggaatgcacacgcgtgcgtgtggtatgtaaatgtgcatgtgtgtgcgcatgtgtgtggtgtgcatatgtgcatgtgtgtgtgcatgcatgtgatgtatgtgcatttgtgcgtgcatgcgtatgtgtggtgtgcatatgtgcatcgtgcatgtatgcatgtggtgtatgtgcatgtgtgtgtgcatgtatgtggggtatgtgcatatgcacgtgcgtgcgtgtggtgtgcacatgtgcatgcatgtgtggtgtatgttcatatgcacgtgcatgcatgcatgtggtatgagcatgtgcatgtatgtgtgcatgcgtatggtgtgcatatgtgcatgtggtgtgtgcatatgtgtgtgcatgtggtgtgtaaatgcatatgtgcatgtgtgcagtgtgcatgcatgcgggtggtaggtaaatgtgcatgagtgtggtatatatgcatatatgtgtgcatgtgcgcttgtgtgcatatgtgcatgtgtgcatgtggtatgtaaatgtgcatgtgtgcatgtgtgcatgtggtgtatgtgcatatatgtgtgcatgcatgcttgcggtgtgcgtatgtgcacatgcgtgcatacatgtgggtgtgtgcatgtgcactggcatgtggtatgtgtgtatgagagacagagtgagccatcacagtttattataatcacctgctataatttttactccaacaaatgacaccataggtaatgattccttatgagatcatcagtgtcctttccaaagagtccctggttttccatcccagccattcacaaatgacacttccctggcctgggtcagaggaggatttccaggtggaagctccttattcctcctggctttgggcctaggactgttcatctgccagagagagaactgccatctgggggttgggtgtggaagtggcgtacaagctgtagaccctacagggaagggcagaacgtgggccagcctggaacacagcccactgttcctttggccacccaaagaaacatcctcactcagaccctttgcagactcaccagtcagagtgctcttattaatgcaaagttggccttgcgggcacaggggctgccagcacacagtaatttccatctcggctcctccacacaccctgtgctaggccactgcctgccactccaggccccagtggctgattctgcccctgtctccttggttcctctgcagacttctgaagctgttgtcaaggtggatgtggtgagtgtgggggccatgcaggggctctggggtgagagggtcctttattggcaatgatgtcaggccaaagggtccagcatcagggacagagccagccccagcccccgcatgcttgggccagcacacctcccctaagatgcagtggaaaagagctgggtgagtgcaggactcggtgccagtcctgcttgggcgagtggatcgcactggcaggtcacaacactctgtggcctgtggcaccttctccataaaataaggccctgccccttggacatgggtggccccacagagcctcatggagcccaaggcttcctgctgacagatggcggaatgggtggaggctctcgggattgtccaggcaggaggagtccatgtaggactctggacctggccaacctgcaggctgaggaggagaaggagaagaagaagaagaagaagggcactgcggaggagccagaggaggaggagccagacgagagcatgctggactggtggtccaagtactttgcctccattgacaccatgaaggaggtgagacctcgggtagggtgaggggaggtgaccccctccacactcagaccctcctgtccagcttctttcccacggcccccaagagctggatcccaactccattcatgtgagtttgggatggttttgtctcacatccttgaaatcctagctcagaactcaccttccaagatgatggtcccatctaccttccctgcttggttttcttttgtcctcattgactcattccacaaatgcctcttgggtatatgcgatgagccaggctccatactaggtgctatgggagccaaaagatgccacacctgccctgatgggcctccggtttactgggcaaaatggacatgtaaacagagacttagagaggactatgtgataacaaaggcaaatcatggcttgggggaatcagggaaggcgtctcagaggaggtgacctttgtggaaaaggagaaacatgttctcagaggccataagggaacaactgcttatcagtagtccttacgactcttcttcataatgttttattttacacatcttggtcatcggcacgtgaatgattcttcccctattacacatatgtgggttccatctgtttggccagattgcaagttccagaaagcgcatttctctgctttcttgtttgtgtcctctccacgctgcctacctagctcagggtgctctgactggccacctgaccaggagggacacatgcctgcagttgtgtttcctcagtggggccagagctgatccagccacatcctctcccaggccctttctgtgacccaagctaggtgtgatatttattagagcacacattaagctgctgtagcaagttagagtgaagtgaacaagacagcagtttatttctcacataacatctcagagagtgggggttaggctggtatggtggctcagtggtgtcaaggactaagatcctgacctcttgtttgtcacatctgtaaggttggaggtgactcaacatcatgttctaattcaagtgcacaggaagggttaaagaggagatgaggcatatgcttttctttttcagggcccaatccagaagctgcacatatgacttccactcacattgatcagaatctagtcccttagctacacttatctgcaaaggaggctgggaaatgtaatctttcacaaggtggctgtgtgctcagcaaaacttgtaaaaataggagaacagatcattgaggacaactggtagtctcgtctcccaccatcaagttggccaggctggagctgcaagaggctgcctgttgtcgtctctactcctgcaattttcacagactgccaccaggtggcggtggcgacttagttgaaacctggtttctagtttctagtaagatttattctcgtttccagtaagatggggtgtgctgagtgaaagaaaatatagtacattttcttactgttatacttttgtacattaaaacaatttattaatatcactaaaagcaacattaaaatgcactgtacttttttaagtagaaaatgtaaatatttattgcaaggtgttatttcttttttttttaaattatactttaagttctagggtacatgtgcacaatgtgcaggtttgttacatatgtatgcatgtgccatgttggtgtgctacacccattaactcgtcatttacagtgggtattgctcctaatgctatccctcccctctcccccagcaccaccacaggccccggtgtgtgatgttcccctccctgtgtccaagtgttctcattgttcagttccctcccatgagtgagaacatgcagtgtttggttttctgtccttgtgacagtttcttcagaatgatggtttctggcttcatccatgtccctgcaaaggacatgaactcatccttttttatggctgcatagtattccatggtgtatatgtgccacagatgcataaacccctaagtaccactagtcacactgtacacattataaactttttttaacccacttaagcagagcacatggtggacttgaaatgcagtagggaagattttctacttctagtgcattaagactggtctgggcccacaatttggggtcaacagactcctccccaggaaacccaccttctgtccttttcatctcatcttttggcagcaacttcgacaacaagagccctctggaattgacttggaggagaaggaggaagtggacaataccgagggtgagccctggaacctggaactctgcctcctcctccccgcccctgggtggtcagctctcctgcccacctcatcacctgcttctcttttccctcctgccagccctcccagccttagtagccagggaagcagcatcagtaatccatgggcagtactgggcaggctaaggcccttgtccagggaggcttttactctgaccagttcagcacccacagtgatgggcagacatttagagccacagaacatcagagctagaagggacctcagagctcattccatccagcattttccagactcttttccatgaagaaaattgatggatgttctagaaggaacaaattagttttggtcaaattagtttaggaaaagctgattgaaacagcttgttttggtgcaggacttttcataccctttactgtgcaaatgttattatacatctctaaaaggaagacacagtataaaatatttccccagcttattggatcacagtaccctttcttctaaagcatgccagcagcatctgcaccaggtgctccactgaatgaggtttgggaaatgctaatacagagtgttattattatggacaagaagagggaagctagtgaggaaagtgagtgggcaaggaactgcgcagcaacaggcctccacccccaaacccatgctccttcctgcccctctcttccaaagggcatgaagacagtcttcagacaccttcccgggcataaacccactggggcccccagcacctccatgaggcgggcatgctagggagtattatctgcatttgacagcacatggacatccgagagttaagttagtaaagcaaattagcgacagagctgggtctcgaatccaggccttcctgctctgctcatttctgctccacctccttttctgcttctggccaggcctgaaggggtcaatgaagggcaaggagaaggcaagggctgccaaagaggagaagaagaagaaaactcagagctctggctctggccaggggtccgaggcccccgagaagaagaaacccaagattgatgagcttaaggtgagagcctaggagcagacccttctagggtgtgtgggggcgggaagaggggggcgcagtgatcctgcaggtggggcaggacaaaagccagagaccaggcagccgccccctaacagcctggtctgtctcaggtataccccaaagagctggagtccgagtttgataactttgaggactggctgcacactttcaacttgcttcggggcaagaccggggatgatgaggatggctccaccgaggaggagcgcattgtgggacgcttcaaggtcaggccaggagcacgggcccagcctgagcacccgccagcccttgccccccccacaggttcccccactcacctcccaccactgccccggccactgcctccagaagccctggactctcccatgactcagcagttaaagggtgaaggccctgccacatcagggtccagccctcctggtgctgttagctattttgaatgccacccttgccaggcaaacctacaccctgacccacatttgtcttgcccagggctccctctgcgtgtacaaagtgccactcccagaggacgtgtcccgggaagccggctacgactccacctacggcatgttccagggcatcccgagcaatgaccccatcaatgtgctggtccgagtctatgtggtccgggtgagactcccgtcgctttccctccttgcaagtctcctcatcctcccatctgggagagagcaaagaagctgcatactggccaggtgcaatggtttacgcctgtaatcccagcactttgggaggccaaggcaggaggatcacctgaggtcaggagttcgagaccagcctggccaacatggttaaaccccgtctctactaaaaatacaaaaattagccaggcacagtgccacgcacctgtaatcccagctactgaggaggctgaggcaggaaaatcgcttgaacctgggaggtggagcttgcagtgagctgagatcacgtcattgcactccagcctgggagacagagcgagactctgtctcaaaggaaaaaaaaaagaagaagaagctgcatactgacagccccagactgggaggcaccagggagatcatttggtctagtctttatcttttctagaggaagaagtcaacgcccagagaggggtagccacttgcctagggtcacacagcaagcctcctgaggggtccagtgctcctgcccctgcccttcactgtcataggaccctcaggcagcctggcaggggcactgaagatgagcagggcatgggagcctgctcaggcagcccttctccccattccaggccacggacctgcaccctgctgacatcaacggcaaagctgacccctacatcgccatccggctaggcaagactgacatccgcgacaaggagaactacatctccaagcagctcaaccctgtctttgggaagtaaggcttcttggtgccctcccctgccacacccctacttctccaacccagaacacctcccaccctagccaatccttaagcccttctcctaactccaccccaccaggtcctttgacatcgaggcctccttccccatggaatccatgctgacggtggctgtgtatgactgggacctggtgggcactgatgacctcattggggaaaccaagatcgacctggagaaccgcttctacagcaagcaccgcgccacctgcggcatcgcccagacctactccacgtatgtggggcatggggcagagggcgggggcagtgtgcctgctttgcctccactctaaaatgagattcagatcctggtgatttgagaggttagacattgtggtttctgtcccaggccaggcctctgcccctacagtccctgggcacagtcttcaggggacaggactgcagatcccaaaacaaggagagggacagtggattccaggacagaggaggcaggacgaggagagacaagtgggctagggaaggtgggggctagcaagaggaggacagaaagagtcccctggggatctgggccagctctgccacttataggctgtgtgaccctggccaagtcccttcacctctctggttttcagtttcctcatgggagtctctgaggttccagaggagtgggcacagtgaggggatgcagtggggctaggctggggacactgatatgtggtccaaggcccagggcaggaaggttcagcctccagcagccctagtgtctcaggtgagcctggggcccagggcaggaggaatcaggctcacttgctgatgagggcaacagccaactttagagaactggccacgaccagctgtcatccaggatggcttagtcccacccagcccctccaagcctgtgtgtcccctcccacagacatggctacaatatctggcgggaccccatgaagcccagccagatcctgacccgcctctgcaaagacggcaaagtggacggcccccactttgggccccctgggagagtgaaggtggccaaccgcgtcttcactgggccctctgagattgaggacgagaacggtaatggggcactggatgcagccgcctgccccctctccagggggtttcagaggccaggaggggcccacacttccctggggaacctcacagcctagcctggggtgtcctcagcctaaacctggtcttagtgaccctctgctcatcaccccagagccccgttcctgtctgcccagcctctgtgcttccacccctcctacagggcagccccacctgctttctctctgtccaaatcccagtgaggtagagaggctatctgcatcccattctgcagataaacaaaccaagatcctacttctagtgactcgcccaaggtcatgtggctctttagaggcagagcgagggcatcggcccaggtccatctggctctaatccttaaactctccttacttctctgtccatgaggcacttcccagagaagcagagaattgggaggtgtctgtgctggtatctgatcactttcaggtgctgggacaggaagtggattctcccctccctgacccttctctcagcccagcagggctctccagtcaacttccccaagcagaggaccaagggcacagacctctcttggccctgtggggcagctgagaccctgggcaagccacttctccttctgtgcctcagtttccccaacagtgaaaaggaggtggggtagacaggtgatggcatagaggcttctttgtgctcctaagtccctagtcccagcaaaggtcttctggttctgctgagccatgtgtgcagctgagccgccggcacccacaggtcagaggaagcccacagacgagcatgtggcgctgttggccctgaggcactgggaggacatcccccgcgcaggctgccgcctggtgccagagcatgtggagacgaggccgctgctcaaccccgacaagccgggcatcgagcaggtgacacttgcatggccaagactggggttcttgggtattggggaccagggatccccaacctgagtcagtaaaggtagaagccaggcctcacgctgtccgctgcattccagaaagcctggcaggcaccttcccaccaaggcccctcagggtaacttgaatggcaagggtctttgctttgagtgagaattacatcagctcaggcagagacctgggttgtctccctcagaagctgtgattggctattggtgacatcataggaattcctggcatccaaagatggaaactgatgaactgggtccttgacagaacaaaggttaggagggagaggagagctgatcttcctgggcagagggagaaggccctgggagatctgccacaaccctcttcctcagggccgcctggagctgtgggtggacatgttccccatggacatgccagcccctgggacgcctctggacatctcacctcggaagcccaagaagtgagcggcctggggcccagcgctactcccttccggcccaccccacccacttcccaccacggcccaacccttcctgcggggggctcaggtccagatggccttggccagttggcatccctggggcctgggtgtggccactgggccttataggggagaaactgaccaaccaatcgatagagtttagggcctgccctggagagtccccacgtgctaaggcaggacaacgccttccaccctgcatcagtgagcgagacaagccccacacagcacactccggtgcattgtatctacacggtctacgcgcccatacacatgcatctcatgcacacacacacacacagcatagcactcccacggacacccacacacatgcccacactgacgcactccttcacaacacacagaacccctgggagccggccctgcgtcatcctcacatccaggctagtgtgatgttccgccaagttttctttggagtgcctgccagtgatgaatccaggagtgagtgcctggaagaggcaggaggtggtagagtgaaaagaacccgggtttcccatccataaagcggcaggttcaagtccagctgtcagacagtgactggattcagggccagcttcagggatggaggaagccacacagggtcccactcttgtttccatgctcctatgttgccatcttgaaattctttatgacaagtgaccctgcatttccatttggcgctggccccagcaaatcatgcagcaaattctgccaggaatgtcctggaaacctgaggccatgagtcagctgttccagggcctgtcattagggggcacccaactcactgggccactctgggctcgcagccctgtctgcaatcccaggagagccatgctcagatcaatttttagtgaatgactcagcctcactcttaatgattgaaatgaactacatcattcataattacaattaaaccttgaggggaaaatcctctttggggacagggacatacagcttccatgggcttccattgctggctactgggcttaaatgcagacttctcttggaactagcatctgagacagagggtggcttcctcccctcaccccacccccaccgcccacagccatgtgcctggtgggccttctcactcatgcctctgctcccccaaccccaaaccactcctccagccccagcctggcccaggccctgtgctgaccccaagaccccagggcttctctccgcctgccccatcccagccctggcaccctggcataacccccacctggggctgctaaccagccttctctccctgggcccaggtacgagctgcgggtcatcatctggaacacagatgaggtggtcttggaggacgacgacttcttcacaggggagaagtccagtgacatcttcgtgagggggtgggtgagcagtccctgcatgggagggactgagctgggtggggcttgcttcccggggggcaggagaggaggcagagggaaggtggctgtgggtgggagaggccccaccagcctggctgcgggtctggagatgtggcgcccacaggtggctgaagggccagcaggaggacaagcaggacacagacgtccactaccactccctcactggcgagggcaacttcaactggcgctacctgttccccttcgactacctggcggcggaggagaagatcgtcatctccaagaaggagtccatgttctcctgggacgagaccgagtacaagatccccgcgcggctcaccctgcagatctgggatgcggaccacttctccgctgacgacttcctgggtgcagagcagggcagggatgggggttcaggatccagaactgagaagaggcaggggccgggttggcggggacagggagagccctgccttggggggacaaggggtcattgcttccagtccatcagagccaggggtgtccgacggggttccgcccccaaggacccacctaaccgtccctaggcagatgttctcagtgtcataaccaggctgacaacaagctttggacacaccaaggagggggcagtcagtgatgatgggggaggggagaggctccctaagggagtcgggaaacctccctgggcctcaggttgcttctctgtaaagcagggattctccctaaaactctaatctgcatctgcaaaagcttgtgggattagcaggactttgacagaatggatgcatggcagggagtggcaggggagaccccaggagagaccctctggggtgaaagaaggacctgagtaaagcatgggggctggggctgcctagcaagcccacgaggatgcctgcattgaggccagttgctgggagtgaggcaggaggatgagatgtgggctcagggaggtctgcactcagcaaacaaggggccgaggagcccagacccccacccccaccccgccccaccccagccctgttcactctgagctgacactgaggttgccacaggggccatcgagctggacctgaaccggttcccgcggggcgcaaagacagccaagcagtgcaccatggagatggccaccggggaggtggacgtgcccctcgtgtccatcttcaagcaaaagcgcgtcaaaggctggtggcccctcctggcccgcaatgagaacgatgagtttgagctcacggtgcgcaccccttcctgctcgggcagtaggcagggctgggactggctggggtgccaagggcccagcacgcagcctggacgctgggacctgtctgtcctctgcagggcaaggtggaggctgagctgcatttactgacagcagaggaggcagagaagaacccagtgggcctggcccgcaatgaacctgaccccctagagaaacccaagtgagtgccctgccggcccagcccctccccactctggctcttggaggcgctggaacaggaaggagacgatccccagacaccccatctcttcctgggccacagcctcattacaggggagcctcctccctgccctctgccaaccctgaatcccacaacgtccctttgaaccagaggatgggctaggaatactggagagcaggaccttccctgggaaaggccccatctagcggagagaaactatgctcttcccttcctagcttttgcagaagagccagctccagtggtggcctctggggccatggccagccttgatggccagaggggtgcctagaactgcacacacagcccaggacagcttccctcttggtcttggcccctcgccacacccaatcccttctcctccctgtccctcctctgcgctctctacccttcatactccagccggcccgacacgagcttcatctggttcctgaaccctctcaagtcggctcgctacttcttgtggcacacgtatcgctggctgctcctcaaactgttgctgctcctgctgctgctcctcctcctcgccctgttcctctactctgtgcctggctacctggtcaagaaaatcctcggggcctgagcccagtggcctcctgggtctgatatttcttacttcttcctctggaccaagggctaggcaggcgcgtgcacacacacacatatacacgcacacatccacaaacacaaatatgcatacatgtgcacacaaacacacacaagcatgtatgcacacatgtgccacgcacaagtgcatacacatgcactcaagcacacacaggcacacacttaagcccacacaaacatgcacagcaactttcaagctttcatgacagaatagactctcagaactagaaatgactattttacacttttccacattaagccaaagaggtgaagtagcttgctcaaggttacccagcaaattagggtagagccgggactcaagccaaggtttccaaatttccaatcctgtgttctttgcacaccacctctgctcccagccatgtttctcccagactgtaacccaattttttttttttttttttttttttggagacagagtctcgctctgtcgcccaggctagagtgcagtggcacaatcttggctcactgccagctccgcctcccgggttcacgccattctcctgcctcagcctcctgagtagctgggactacaggcacccgccaccacgcctggataattttttgtatttttagtagagacggggtttcactgtgttagccaggatggtctcgatctcctgacctcgtgatccgcccatctcggcctcccaaagtgctgggattacaggcgtgagccaccgcgcccagccgactctaacccaatttcattggcagaaagaagctgagctatggacagggaaaagggaagggtgtggccagggttagccaacaggtctggaaatggctctcacccgtgtgtgacctcccagtccagggctgttgttttctgcccttcaggataataattccattcaactcaaacatttcatagccaccatggcctgaacacccaactgcaggtgctcagagctccccaggcactggctcactgtgccattgcgccaaacccaggaggtaggtactgcttgtaaccccattttatacatgaagaaaccgaggttgatagaggtgcctcacttgcctgtgaaaaccattcaaaaccaggtgccctgcacccaagccccggctctgtgtccccaccaatactgagctcagctctggggctgcacgccatgtcctctgggaggcagtagtttgaaaatgcatatgcagtactttcacttgtatcttgacattttacaaaacctattgtttttataacacaaacgacagatagtgaggctggccaggtgcttctcggctgggaggctctacagaaggtggagtgggtcttcatcctgagagtgggcaggtcggtgagggcagcttgcaccccacaggggctgctcagaccctcagcagggcccggtgggaacagccatttatgtccatcagaaaggaagaggttgtgaagcaccagtcttaccaaggacgtggggcagcacatagaacgagctaaccgcaggagcttcctaacgatgagaactgcctgcagggccaaggctgccccatgctgcaagtagctcccatctaggccttaggaggagattcgggccccaaaggtgctgcagggaggatagagttttgtaagcagcaagtcgggtacttagaaatgggtttaaaccctggctccagcattcactgcttttggggctggggccatggcagggcttttgggggtccagaaggacagaggatggggtgcactgggaggcagctcctgcccactggctgaccggctcctctcttccacttcccagccggcccgacacggccttcgtctggttcctcaaccctctcaagtccatcaagtacctcatctgcacccggtacaagtggctcatcatcaagatcgtgctggcgctgttggggctgctcatgttggggctcttcctctacagcctccctggctacatggtcaaaaagctccttggggcatgaaggccgccagctcccgccagccgctccccagccctgccgcatttcctttcagtggcttggactctttcccatctcccctggggagcctgaggagcccagcgtccactcttcatgccttgggccgagcctgcctcctgcttgcgggggccgcctgtcctcactgccccaggctgcggcttgcccagtcccgcccctctgacccctgcctgtgggctggggagccttggatggggtggggacctggaatgggtctctcttgccccacctggctgaggcgccacccttcttcaggcccaggctccagaggaagactcctgaaaccctccccaggtcttccaagtacaggattgaagctttagtgaaattaaccaaggaccatgggtcagtgcccagggctttaaaaagaatgaacgagcaaaaggtatccccgccgtgacccctgcagatagcaccggtctttgatccgcagcaggggccagaccctgcccacaagtcccagcgcggctgcttctgccactgctgggctccacttggctcctctcacttcccagggggtcgcctgtcctgcctgtgggtttccatggcttcccagagctccctctgccccagccagcgcctccaggcccagctgaggagctgtgagaagcagcagaggggactccccatcccgggcacaccctgtcctcccacccctgcccccttgcccttccagccctttcagctgcagctgggagctggcccgtcaagtgctgcccctgcctgtgtctgggtttctgttggctgtttttcttttcttgagtggtgatttttctctaaataaaagaagtcaagcactgagctgacaggtctgcactggtcaagctgagaggagcagccgcaggtgcggggcagaggcagcagttctctaggctggcagattcagtaccagcagggctcccatggcctttccccttcaagtggcctctggtggcccagggttcaaggcaggcctcaggcacagggctgcccacccaggctgcccacaggaggagtcttacaccatagcccaaagggcacaccagcctgggcccaggggcccccaaagcaccgaaagaatccttcaggtctggggccagtctgaaggcttaaggccccacaagggcccaaaagctctagcctccacccacagaaaccagttcccctgaaagcaagaaaggagccccacgctactggcctcggcctctgactcacaccactatctgagcctggggcaaagtcccctcatgacacagaggtaggggcaagggcctggtcttgctagacctgacctctttaaagagattcagccacaactttaaaaggctttaatcataatgcaggacacaggtaactcctctggctccttatttcgacaggctataaagacagccctggaaaatccagagagcaggcccaggtgcggcccagtgggtgatatgagctggctccggcacagacaccagcatcaggccagccctaacacatcagcctttggcggtccagctcattttgtgggtacccgcaacacctgagtgggaggaacttgcagttcagagttgatctggaaaagaaagggtgaaagtcgttacatttttcccagggccctccttctttgccacccttgcgagccacgctggctctcccatgggcctccaaagccctgcacgcatctcctctccaaagctgagagatgctgaacacccacagactgcctccctgcaggagacacgcctgagccttcttgctcagcttctgctccagctgtgacctctggtagcgttcttcatctcccgcccgtccattctctgcagtcttcccctctcctctctccacgcacccatgccatccccaatctagcctgccccacctcttcctcccccagcctcttgtatacagtagcatctgtggaagcgggaaccataccgtccagaatgtctgggtcctgtcacaggccaagggtcattatgaggccaaggttcactacaacatcccactttcagctgtggcctgggacctgggactgtgctggggccacgcagcccctgtggctggacttggagctggcctcagtcacctcacacgtgtgcaactaacagctgcgtcacgaccttcctggcctacagccccagctgcaggtgcccacacccgcagagcaggaaatgtcagcaatggactttttccttcctcctcttgccaggccatggggaagttgtccacaactattgcagggttgggcacagatgggggccagggaatatctgccccagcagagcctccttccccatgcgaggatgaccctccagtcatatcccaggcagggaaccggggctggtgggtggaaagagcccaggctctggacgagttgcaaactctgcaagttgtgattgtcctttgtgtgaaatgaggagcattgtttccgccctgtccacctcacacagcgggtgtgaggatggaagaagagagcacagctggaggctctgtagctggggagctgctcctggctgtggcactgcttcacacagagcagtcccagctggccactggcaccagaaaccacagtatcaaagagacactgtcacacctgagctgtcctggaggagacttcaggcaagatctactcctttggccagtagttgtctcaaggtgccactcttgattttttacatcatatcacaaagctcccttgcctctgacggggaggggactcctcgttccctaatcccagctccagtgcccctgccccacccgtgtctcccgctgcccctccttggaaggccccgccgcccaccttggagttcagatactgctgcagtagcgcc

SEQ ID NO: 13 - protein, 1977 aa, Mus musculus
MALIVHLKTVSELRGKGDRIAKVTFRGQSFYSRVLENCEGVADFDETFRWPVASSIDRNEVLEIQIFNYSKVFSNKLIGTFCMVLQKVVEENRVEVTDTLMDDSNAIIKTSLSMEVRYQATDGTVGPWDDGDFLGDESLQEEKDSQETDGLLPGSRPSTRISGEKSFRRAGRSVFSAMKLGKTRSHKEEPQRQDEPAVLEMEDLDHLAIQLGDGLDPDSVSLASVTALTSNVSNKRSKPDIKMEPSAGRPMDYQVSITVIEARQLVGLNMDPVVCVEVGDDKKYTSMKESTNCPYYNEYFVFDFHVSPDVMFDKIIKISVIHSKNLLRSGTLVGSFKMDVGTVYSQPEHQFHHKWAILSDPDDISAGLKGYVKCDVAVVGKGDNIKTPHKANETDEDDIEGNLLLPEGVPPERQWARFYVKIYRAEGLPRMNTSLMANVKKAFIGENKDLVDPYVQVFFAGQKGKTSVQKSSYEPLWNEQVVFTDLFPPLCKRMKVQIRDSDKVNDVAIGTHFIDLRKISNDGDKGFLPTLGPAWVNMYGSTRNYTLLDEHQDLNEGLGEGVSFRARLMLGLAVEILDTSNPELTSSTEVQVEQATPVSESCTGRMEEFFLFGAFLEASMIDRKNGDKPITFEVTIGNYGNEVDGMSRPLRPRPRKEPGDEEEVDLIQNSSDDEGDEAGDLASVSSTPPMRPQITDRNYFHLPYLERKPCIYIKSWWPDQRRRLYNANIMDHIADKLEEGLNDVQEMIKTEKSYPERRLRGVLEELSCGCHRFLSLSDKDQGRSSRTRLDRERLKSCMRELESMGQQAKSLRAQVKRHTVRDKLRSCQNFLQKLRFLADEPQHSIPDVFIWMMSNNKRIAYARVPSKDLLFSIVEEELGKDCAKVKTLFLKLPGKRGFGSAGWTVQAKLELYLWLGLSKQRKDFLCGLPCGFEEVKAAQGLGLHSFPPISLVYTKKQAFQLRAHMYQARSLFAADSSGLSDPFARVFFINQSQCTEVLNETLCPTWDQMLVFDNLELYGEAHELRDDPPIIVIEIYDQDSMGKADFMGRTFAKPLVKMADEAYCPPRFPPQLEYYQIYRGSATAGDLLAAFELLQIGPSGKADLPPINGPVDMDRGPIMPVPVGIRPVLSKYRVEVLFWGLRDLKRVNLAQVDRPRVDIECAGKGVQSSLIHNYKKNPNFNTLVKWFEVDLPENELLHPPLNIRVVDCRAFGRYTLVGSHAVSSLRRFIYRPPDRSAPNWNTTGEVVVSMEPEEPVKKLETMVKLDATSDAVVKVDVAEDEKERKKKKKKGPSEEPEEEEPDESMLDWWSKYFASIDTMKEQLRQHETSGTDLEEKEEMESAEGLKGPMKSKEKSRAAKEEKKKKNQSPGPGQGSEAPEKKKAKIDELKVYPKELESEFDSFEDWLHTFNLLRGKTGDDEDGSTEEERIVGRFKGSLCVYKVPLPEDVSREAGYDPTYGMFQGIPSNDPINVLVRIYVVRATDLHPADINGKADPYIAIKLGKTDIRDKENYISKQLNPVFGKSFDIEASFPMESMLTVAVYDWDLVGTDDLIGETKIDLENRFYSKHRATCGIAQTYSIHGYNIWRDPMKPSQILTRLCKEGKVDGPHFGPHGRVRVANRVFTGPSEIEDENGQRKPTDEHVALSALRHWEDIPRVGCRLVPEHVETRPLLNPDKPGIEQGRLELWVDMFPMDMPAPGTPLDISPRKPKKYELRVIVWNTDEVVLEDDDFFTGEKSSDIFVRGWLKGQQEDKQDTDVHYHSLTGEGNFNWRYLFPFDYLAAEEKIVMSKKESMFSWDETEYKIPARLTLQIWDADHFSADDFLGAIELDLNRFPRGAKTAKQCTMEMATGEVDVPLVSIFKQKRVKGWWPLLARNENDEFELTGKVEAELHLLTAEEAEKNPVGLARNEPDPLEKPNRPDTAFVWFLNPLKSIKYLICTRYKWLIIKIVLALLGLLMLALFLYSLPGYMVKKLLGA

SEQ ID NO: 14 - DNA, 6862 bp, Mus musculus
  source 1..6862: mol_type = other DNA
ttggttgccttggtctctgtgggcagcagcaggaggaggcggcagcagccagagaagagggaggcgtgtgagccacactccaccagcgagcttcttcccgctgctctggaactgcccaggctctccccaccagcatggccctgattgttcacctcaagactgtctcagagctccgaggcaaaggtgaccggattgccaaagtcactttccgagggcagtctttctactcccgggtcctggagaactgcgagggtgtggctgactttgatgagacgttccggtggccagtggccagcagcatcgaccggaatgaagtgttggagattcagattttcaactacagcaaagtcttcagcaacaagctgatagggaccttctgcatggtgctgcagaaagtggtggaggagaatcgggtagaggtgaccgacacgctgatggatgacagcaatgctatcatcaagaccagcctgagcatggaggtccggtatcaggccacagatggcactgtgggcccctgggatgatggagacttcctgggagatgaatccctccaggaggagaaggacagccaggagacagatgggctgctacctggttcccgacccagcacccggatatctggcgagaagagctttcgcagagcgggaaggagtgtgttctcggccatgaaactcggcaaaactcggtcccacaaagaggagccccaaagacaagatgagccagcagtgctggagatggaggacctggaccacctagccattcagctgggggatgggctggatcctgactccgtgtctctagcctcggtcaccgctctcaccagcaatgtctccaacaaacggtctaagccagatattaagatggagcccagtgctggaaggcccatggattaccaggtcagcatcacagtgattgaggctcggcagctggtgggcttgaacatggaccctgtggtgtgtgtggaggtgggtgatgacaagaaatacacgtcaatgaaggagtccacaaactgcccttactacaacgagtactttgtcttcgacttccatgtctctcctgatgtcatgtttgacaagatcatcaagatctcggttatccattctaagaacctgcttcggagcggcaccctggtgggttccttcaaaatggatgtggggactgtgtattcccagcctgaacaccagttccatcacaaatgggccatcctgtcagaccccgatgacatctctgctgggttgaagggttatgtaaagtgtgatgtcgctgtggtgggcaagggagacaacatcaagacaccccacaaggccaacgagacggatgaggacgacattgaagggaacttgctgctccccgagggcgtgccccccgaacggcagtgggcacggttctatgtgaaaatttaccgagcagagggactgccccggatgaacacaagcctcatggccaacgtgaagaaggcgttcatcggtgagaacaaggacctcgtcgacccctatgtgcaagtcttctttgctggacaaaagggcaaaacatcagtgcagaagagcagctatgagccgctatggaatgagcaggtcgtcttcacagacttgttccccccactctgcaaacgcatgaaggtgcagatccgggactctgacaaggtcaatgatgtggccatcggcacccacttcatcgacctgcgcaagatttccaacgatggagacaaaggcttcctgcctaccctcggtccagcctgggtgaacatgtacggctccacgcgcaactacacactgctggacgagcaccaggacttgaatgaaggcctgggggagggtgtgtccttccgggcccgcctcatgttgggactagctgtggagatcctggacacctccaacccagagctcaccagctccacggaggtgcaggtggagcaggccacgcctgtctcggagagctgcacagggagaatggaagaattttttctatttggagccttcttggaagcctcaatgattgaccggaaaaatggggacaagccaattacctttgaggtgaccataggaaactacggcaatgaagtcgatggtatgtcccggcccctgaggcctcggccccggaaagagcctggggatgaagaagaggtagacctgattcagaactccagtgacgatgaaggtgacgaagccggggacctggcctcggtgtcctccaccccacctatgcggccccagatcacggacaggaactatttccacctgccctacctggagcgcaagccctgcatctatatcaagagctggtggcctgaccagaggcggcgcctctacaatgccaacatcatggatcacattgctgacaagctggaagaaggcctgaatgatgtacaggagatgatcaaaacggagaagtcctacccggagcgccgcctgcggggtgtgctagaggaactcagctgtggctgccaccgcttcctctccctctcggacaaggaccagggccgctcgtcccgcaccaggctggatcgagagcgtcttaagtcctgtatgagggagttggagagcatgggacagcaggccaagagcctgagggctcaggtgaagcggcacactgttcgggacaagctgaggtcatgccagaactttctgcagaagctacgcttcctggcggatgagccccagcacagcattcctgatgtgttcatttggatgatgagcaacaacaaacgtatcgcctatgcccgcgtgccttccaaagacctgctcttctccatcgtggaggaggaactgggcaaggactgcgccaaagtcaagaccctcttcctgaagctgccagggaagaggggcttcggctcggcaggctggacagtacaggccaagctggagctctacctgtggctgggcctcagcaagcagcgaaaggacttcctgtgtggtctgccctgtggcttcgaggaggtcaaggcagcccaaggcctgggcctgcattcctttccgcccatcagcctagtctacaccaagaagcaagccttccagctccgagcacacatgtatcaggcccgaagcctctttgctgctgacagcagtgggctctctgatccctttgcccgtgtcttcttcatcaaccagagccaatgcactgaggttctaaacgagacactgtgtcccacctgggaccagatgctggtatttgacaacctggagctgtacggtgaagctcacgagttacgagatgatccccccatcattgtcattgaaatctacgaccaggacagcatgggcaaagccgacttcatgggccggaccttcgccaagcccctggtgaagatggcagatgaagcatactgcccacctcgcttcccgccgcagcttgagtactaccagatctaccgaggcagtgccactgccggagacctactggctgccttcgagctgctgcagattgggccatcagggaaggctgacctgccacccatcaatggcccagtggacatggacagagggcccatcatgcctgtgcccgtgggaatccggccagtgctcagcaagtaccgagtggaggtgctgttctggggcctgagggacctaaagagggtgaacctggcccaggtggaccgaccacgggtggacatcgagtgtgcaggaaagggggtacaatcctccctgattcacaattataagaagaaccccaacttcaacacgctggtcaagtggtttgaagtggacctcccggagaatgagctcctgcacccacccttgaacatccgagtggtagattgccgggcctttggacgatacaccctggtgggttcccacgcagtcagctcactgaggcgcttcatctaccgacctccagaccgctcagcccccaactggaacaccacaggggaggttgtagtaagcatggagcctgaggagccagttaagaagctggagaccatggtgaaactggatgcgacttctgatgctgtggtcaaggtggatgtggctgaagatgagaaggaaaggaagaagaagaaaaagaaaggcccgtcagaggagccagaggaggaagagcccgatgagagcatgctggattggtggtccaagtacttcgcctccatcgacacaatgaaggagcaacttcgacaacatgagacctctggaactgacttggaagagaaggaagagatggaaagcgctgagggcctgaagggaccaatgaagagcaaggagaagtccagagctgcaaaggaggagaaaaagaagaaaaaccagagccctggccctggccagggatcggaggctcctgagaagaagaaagccaagatcgatgagcttaaggtgtaccccaaggagctggaatcggagtttgacagctttgaggactggctgcacaccttcaacctgttgaggggcaagacgggagatgatgaggatggctccacagaggaggagcgcatagtaggccgattcaagggctccctctgtgtgtacaaagtgccactcccagaagatgtatctcgagaagctggctatgatcccacctatggaatgttccagggcatcccaagcaatgaccccatcaatgtgctggtccgaatctatgtggtccgggccacagacctgcacccggccgacatcaatggcaaagctgacccctatattgccatcaagttaggcaagaccgacatccgagacaaggagaactacatctccaagcagctcaaccctgtgtttgggaagtcctttgacattgaggcctccttccccatggagtccatgttgacagtggccgtgtacgactgggatctggtgggcactgatgacctcatcggagaaaccaagattgacctggaaaaccgcttctacagcaagcatcgcgccacctgcggcatcgcacagacctattccatacatggctacaatatctggagggaccccatgaagcccagccagatcctgacacgcctctgtaaagagggcaaagtggacggcccccactttggtccccatgggagagtgagggttgccaaccgtgtcttcacggggccttcagaaatagaggatgagaatggtcagaggaagcccacagatgagcacgtggcactgtctgctctgagacactgggaggacatcccccgggtgggctgccgccttgtgccggaacacgtggagaccaggccgctgctcaaccctgacaagccaggcattgagcagggccgcctggagctgtgggtggacatgttccccatggacatgccagcccctgggacacctctggatatatcccccaggaaacccaagaagtacgagctgcgggtcatcgtgtggaacacagacgaggtggtcctggaagacgatgatttcttcacgggagagaagtccagtgacatttttgtgagggggtggctgaagggccagcaggaggacaaacaggacacagatgtccactatcactccctcacgggggagggcaacttcaactggagatacctcttccccttcgactacctagcggccgaagagaagatcgttatgtccaaaaaggagtctatgttctcctgggatgagacggagtacaagatccctgcgcggctcaccctgcagatctgggacgctgaccacttctcggctgacgacttcctgggggctatcgagctggacctgaaccggttcccgaggggcgctaagacagccaagcagtgcaccatggagatggccaccggggaggtggacgtacccctggtttccatctttaaacagaaacgtgtcaaaggctggtggcccctcctggcccgcaatgagaatgatgagtttgagctcacaggcaaagtggaggcggagctacacctactcacggcagaggaggcagagaagaaccctgtgggcctggctcgcaatgaacctgatcccctagaaaaacccaaccggcctgacacggcattcgtctggttcctgaacccactcaaatctatcaagtacctcatctgcacccggtacaagtggctgatcatcaagatcgtgctggcgctgctggggctgctcatgctggccctcttcctttacagcctcccaggctacatggtcaagaagctcctaggggcctgaagtgtgccccaccccagcccgctccagcatccctccaggggctgctgcgtattttgccttccctcacctggactctctcccaactccctgaggagccctcccacgcctgccagccttgagcaagacacctgcttgctggacttcatccccaccccacacccaaactgttgcttgcctgatcttgtcccaggcctgcctggggtttggggcacagttggcctccaaaaccagataccctcttgtctaaagtaccaggttcctctgcccaaccccaagagtggtagtggcccaaccctccctgtgctttccaaatcttgtcttaaggcaccagtgaaattaaccaagaaacgcggagcaatgcccaaggctctgatgagtaggaacacgtggaaagcaccaggaatgccagcagaggcgaggcggcacacctctctgcagagcatccaggccgagcggcgggcagcggccagctgcttctgcgcatgctctcctcttggctctgcttctttctcacagtcacagtcacttcacagcttagccttgggcttcccatcacttccaggggtgcctctgccttggccagtgtgtgtcagctagtacacaagctccaagtgtgaatcaggtgtactggccgtcctgaagactgactgccctgtccttcctgccgacagccacacccgagtgtacacttaaagcggtgcccttctgcctctgtgggcctgctggctgctgttcctttcttgagtgtgattttttttttctctccctcaataaaataaatcaaactctgagac

SEQ ID NO: 15 - DNA, 95665 bp, Mus musculus
  source 1..95665: mol_type = other DNA
gaagcctagggtcaacttcagttgtcttccttatttatttatctgacttgtttatttaaagacgggtctctttagcaaacctggagcttctccattcagatagctccgctgccattaaactccaggggttctcctgtctccacctttctgccaccgcagagctgggttagaagcccttgcccctgcaccggtctttaccatagactctggaatctaaactcagatcttcatgctcctgtggcagacactttacctactgaggcatctcctttgccctcggctgaggcacagcatgatttatccagagcagtcaggtctgtcccgtccatgatctccaagccttctgagcatccacaaccctggtgattagctagacacatcaagagacatcgtggatactgcccaagagaccagtgccccattcaagctcagacagtgaagttccagatccccatgagaagtggcctgacccctcatctgcccatctgcatgccctctgcaatctgttggctctgagtggcacagcttgctctgccctgccaagtggcaggagcttccattccaggagctggcaggagacacctgaagccggacagggctttatctcggagctggtgctgctgaataatggattcagcatgcgttcctgggctcctgcacacactcactcacacacacacacacacacacacacacacacacacacacacgcgcgctacacacatgctgggctgacaacccagaggggcggggctgccggggctgcacagctctgatgagctgaaggagcagcttgctttggttgccttggtctctgtgggcagcagcaggaggaggcggcagcagccagagaagagggaggcgtgtgagccacactccaccagcgagcttcttcccgctgctctggaactgcccaggctctccccaccagcatggccctgattgttcacctcaagactgtctcagagctccgaggcaaaggtgaccggattgccaaagtcactttccgaggtaaggtagcccctgtctcaggagggtgccagttctgcaagcaggctcagcccatattctgtgagctgatagggacgggagaggacaaggaggagggatggcactgtagctacaaggcttcttaagagtgcccacctgtccctggcctgactagcctttaagtttcatatgatccccgctaggccaacccgccagggtcctggcagagtacagattcttggcttaatgaggggtccatccctgtggtcacacagacccaggactaagggccccaggctagcaccttcctgggaccccttttctaccactactcccagactggcttctgtctgctgaaaaggagtctatgcctgaaaagaccagagtggctagtagaaaccatggcagccagtggtactctgccctccagcgtggtgaggatgctgttggcttttctagaccttctgtttctggacaggaacattattctgacctttcctctgtggactcctcttagctttcttcagcttgtatattatgacctattgtgtaccaaatctggagggctagaaatgtgaggatgagtgtaaggcaggccctgtcctaaagagccacatctggtggggtaggggaaacagttagcaggcaggcacaagtatgtgatgacaagcagaaggggacctgattatcctaaccaagactgggagcaagcagtcagagaaggcttccaggaggaggcaatgctcagctgctggctgagagatcagcagagggagcaagcaaagggaaggatggcgtgggggaattaggaacagtgatccccaaggctgggaacagagctggagaaaggagagacagaggctacgtgagctggagctcagagtggagacagaagctgggctccaaagagccaaggagctgaagctggacttcggccagggtatctggcagcccctaaggatcaagtagagaaacacaaggtcgggctcatctctgtgcccacccacccctgcaaaattcagcctgcctagccactttgaccagggtcaaggtgccattctcccatgtggcgccattcccacccccaggggtcacagggaaggaactatataacccaggatgtacactgtccctgaacgtctgccaggagggagctacgagacagggcaagtcagtagacatcccagtgggagtctccaggtgccctgtgtcacccactcaggccctgggctctctgcctgcaaccagctgttcacagagcaggtggaagttccagccatgtcttctggcaggagcaaggcaggcagaagtgaccagagagtgggctggaccacctactgcattgccggccaccccagtggctgctttttccgcagtagcctagctctttgtgtgccacctgctggcttgtgctggcttgtgctggctttagaacaagtacatccctgggttccacacacagccctgggcctgattcttagccctaggttacttggtggctacagttgtaacaccacagacccgaccaagcagggcctgtctccttcccaaaaagagaaaccagggtccagagagccgaccagtgagttagtgagggatagggacagtggcccaactgtcatggcttcatcctggccacccagtcctgtaatctcttctgtctcctccagggcccacaaggagtgggcatcctgaacaaaagagactcatagacttttttttctcttcgcagagggcagtgttaggaagttgaacccagggtctcccacatgctacataagctctcccctgctgaaccatgtgtgtacctcccctttccagtcttcagttcactctatagcccaggcacgcctggagcacacactcctcttgcctcagcctctacggtagctgagactacggcctgcccaccaggaccagcttttacctcttcctttgagctgccagggcaaacacccttgaatcaggctgtttgtaacccatgctctcctcatagtcagaggtagagcttttggggcaagaagtgaggggcgggcagtagcaacaagaaaaactgcagtcagatctccagagtgaatgctcagacattcccagcaggtggtaactatgggcacccccaaaacaacagctaacattgacatttcagagggaactgaccagcagtgcatgcctttcttacatctacagtccatgtttaaaccacactgcattgggggtaaattagaaaatagagctccctgcccccatctctccaaaaccctcaaatgaggccctcagcagatggggtggtgggccagcatgggagctaagggtgaaggagaggaaggtcctgccctgaggagctgcagggcaacaaagaggcatggactccaccctgcctcacccagcatggccggcctgggcctcccagcagcaaattggaaacagtcgccccactgcatggaggggcctcctgcctgcaggagctggctcaggagcaggacaggtgcagaatgcttgccggattccagtttctctgctcttacttcaactcaagtaatcaccagagccacagaacacagggtgggagctgtctgtctgtctgtcttctgccttgtgctcagcccctgtgacctccccagccctccgctgccagatcccagtggtagcttgtctctctacactcctcccctgagcgttcttgccacagcacaaggctgagaatcctccagacttccacttattcacctggcccgcctgctggtacggaggtcttctgtagcgaggcttcctgtggggtttcatctttacacccctccccacaccccagcttccgtcctactacactgaatgctgatccccaaggtgccaagggcgtcgcgcctgagactgtgtacttctttgttaaagaatggcccccattctccgccttacaaatgtccatcttgtgcgtacttcaaggctcactagtgtgccacctcctccaggaagtcttcccctcccttccacatcctgtacaccctcttgtagctctgccatagtttccccgtgggcacaggtcacactctgtgagctgtgctacctcctgaggaccctcaaggtagagagcagatctcagctgagctgctaagcagccaccataagaaattccctcgttctctgaggtctctagactttttgtttatttgttggtgttttgagacaggatctcatgtagcccaggctggccttgaactctctgaagctgaggatgacaggactacaaacacacagtaccatgtaccacacttttcactgttgaatgggcttaacgtcttcactgccactccttccctgtcactccttggcttagctcaactgtaaatgtctccagaacttggtgctataggatatacccagatgaaaagagatctcaggagccaagagctgagaacaccagctctatcaaccttccttctatcagccgctagctccgagaagcttcagggaccaggaggaaggctgacttcatccttcagcaaatgttgggggtggtctaacccagtccatgtcactcagagccccagcagtcagggagtgcttcctgtaaggggagggaaggttggcctagagaagcaggtcctagctgggtctggatgccatctctgcatacgtggatacaggacccttgaggatgggctgttggagacaaagctactctagatgagggagtggagtgggctcccagccagaacagctgggaagccagtaccgtggctagaggcaggaggatgggggtgagtgtgccctaaggacaagtgtaccctagaggccttgtttgcttgtttgttggtttgttttgtgactataacttctttctggaaccacctttgtcatcatccccagtaagggagtcagactatccaaggcccccatcctcagcatttccctgactgcctaggccatcctagcacctctgctcttggagaatggggcaggtgttcctcttctgaaggcagaagacagaggggctccctgagaacagcagctttagtccatgctggtgtgggcacagtgctgtgcttttgacatagctacaagattgcatcttcagcatccttccatccctccaacacacctgggggacacctggggacaccttcttgcctaaatcccagggtgtcgagagatcctccttttcttccttctccttccaccctcctccccttcctcttctcttccctcctcccactcccctcctcctcctcttcttccttcccctccttcccctcctttccctcctccttcccttcccctcctcctccctccttccccctctcctcctcctccccttcctcctcctcttcttcttcttcttcctcccccctttcccctgagtaagcccaagcagatgcagacctggtagggagcagatattccacccagaacgttccctaggccctcctgctttgatacgggaaggtactttcatgctatgaaaatgactgtaaaattatcttctgctacaaaggcacgcaatgaacactgctggaaatgtctggagagagccaacctgcaaacgattccccagagcaggaaggctcgcttatcacgtccatctctactggcaacaaaaaagctgccttctcctacctacacccactccatggtcagataaaaaatacaataaaaagcttcaaatatatacaagaggagggagcataatcgtttgcagttttgacaccctcagctcacggcccatcgtgttcatgatccccttctaattccctcacgccaattatactgggggggaaaaatccatcatttcatctagaaacagtcatagatatagaaaaaaaacacatatattttactgttccttaaaactgagcaatttccaggtactcagtccacgtcaggttccttcgtctcctcgatgttataatgttttccagctcatggaaagcttcttttaatgtgtcttgtgaatcaagtagttaatgatccattcacccagtctgtcatttatccacaaacagtatttgagagccatccatgtgccaaacattgctctagaccctggggaccctgtgccaaacattgctctagaccctggggaccctgaggggacagcaaagaggccctcgagggggaaggacagccctgaccccatcactgaacatgcagagaattgcagaggagaaggcacgggtgtcagggcagagcacagccagggaaacaggagattggcagccctgacaaggcaggacagaggcaggaggcagtacccatccagccaccctgcagccagaacgggtggggtctgggagggccggcaatggaagggggatatgctgccaggaagctgacccgagtgcaggtcagagaatcgcggcagggacgagcctacagaatagactagtgtggggctgggaagatgcctctatgggcaaagtgcttgctacacaagaattcagagctccagaaccccatgttcatgggaatacaaggtaggcttgcctgcaattccaccctgggacagcagaggcagagatccccagagcaagttagacatggagaatagccatatgagtgagcactgggcttcactgaaagattatctcaatgaataaggttgggcaggtggtacaggatgaatcctggaagccttgggcctccacaagcaagcataacgtgtgttcacactcatgtaaactatacatgcatatgcaaaaatggaaaaagaaagaaaggaatagtgcagtgtagtgtgtggaggtgtgccaggggtctagaagctggccgtgtggcgccgaggctggaaaatgcttaactgtggacccagtgggtcttggtggcacactgaagccttcaaactctgtttgctaagtggatgtgaggagaatgtatgggaggtgtgtgctaagatctggttcaggaagccgggcagtggtggcgcacacctttaattccagcacttgggaggcagaggcaggcggatttctgagtccgaggccagcctggtctacaaagtgagttccaggacagccagggctatacagagaaaccctgtcttgaaaaaacatacagtccatttgattccagactgcagagaggaagccggggcaggttacaactagattggttggaaagggaagcctggtattcagaggagaggcggctcagagacagagtaattgagaggatagaaaaagatgcctctggatagaaggcaggtgtggcttgtggacacagggatttggattttgagaagcagggatcaataagctcaaataagactaagatcatccctgtctttgcctctcgggtgaccctgccagaattctgatgtggagtcccaggcaaagatgggtaaatagtgtgaggtaaaatgatgctggggacaaatgcactgctctgggcagtcagtcctcctctggcctcctgaatgctgacagacacggagacatcaggccaaacttctggagctgtgagcatccatgtgggcacccccaggactggagccttgaccacttccagaagcagctggtcagtcagcaacaggggtcgctgtgcagcctgagggccggtgatgatgccttcccagctctttaagtgtttcagggcgccccatatgccattcttcaagaaggtacaccacttcctaccacataaagaaagacagatgccctggattccccctgtctttgggttcctattaccataacataacaccatgaccaaaaagcaagttgggtaggaaagggtttatttggtttacacttccacattgctgttcatcccccaaagaagtcaggataggaactcaaacagggcaggaagctggaggcaggagctgatgcagaggccatggaaggtgctgcttactgccttgttccccatggattgctttcttatagaacccgggaccatcacccaaggactggttccaccctcagtgggctgggccctctcccattgatcactaattaagaaaatgacttccagccagaccttacagaggcattatctcagttaaggtttccctttgttcagatacctctagcttgtgtcaggttgacacaaagcactgccacattctctaaggatgctccattctcagacggttcagtcttggtcaaatgttcagttccacctcagggagcagcaaacatcacgatagcaaggaggcccgccatcccataccacacagggaaaggtagtcacactgccgtgaagacatggctctcacgtggatccgtgtttcacagttctagaaaaacctccttccacagaatatcctgtgatactcctgcccattagtgcttccatgttaattattattattattttatttgtgtgtgtgttttttttgggtgtaactctatgtctcacgtgcacatctagtacctgctgaggccagaagagggtttcagatgccatagaactggagttacaatacagatggttgtgagccaccatgtgggtgctgggaattgaacccacatcctctggaagagcagctggcgaacctaaccactgagccatctctccagcccctgccttttttttttttaatgtgaaagtttaggataaaatcagcattgttcttgtaacgatgcttttactccatttgagaaaatgaactgtcattcccccttcatgccttattatattcatagtacctggcacagactgagttccctgcacagcgtgtggcttgctggggttgcaggcacctccgtctgcctctgtattggaagaatctatctcccagcatctgctagccctggcctggccttcaaggcaacatttcctccttctctgcctccatgatcctgtctaaaaagtgggatgcaatgaccttggcacgcaggagaaggtttgagctgagtcagagaagtagggttcaataagttcaactgtggcttgagatccttgcccgatgccacctctccggtgagcctgtctgagtctgacttgttgagtgttagcacagtgaggagggagaaatggaaatggccctttgcttagggagatttggagccccgggaaatctccatccagtccccgagcccagccctgtgagtggctggattttaggacagggttttaggagcctgaggctgtgatcttgtgaggagggcagctgattttgagctgaatttctttgttgtactgtgccattacctgtcaataagaaagagaagagcactctgcattggcaaatgatggtttattgccaaagaaaattgacaacaagcagacaagagaatcattagggagatgggtgacctgacacatccctcctccgccgtcaccctaacagggttttctgaggtatcaagcctctgactgaagaacgcacacttgtcttaaatatccacggtgctgtcattgtgacaagcaatatgctgcagggctcgggtgcccctacatgtcagaaggctgacacccgggtctgggaggtggaccagcacgcttggcaacctgagttgaaccacagaacccacacagagacggaaggagaaaatcaactccataatgtcctccacatgtgtgagtggcatgtgcaaccacatacacacatcacacatgcacattgatacgaaaaacttaatagactgacatcctgaacactcccagggaggtccaaccttttgaaaatgggatattgtcatctgcaaatgtgtgccgtattcatagctaatgtggagcccaaaaggttgggcacattaacacagggtatggtctttggtcataatgaaattcatcatgaaatcaatagtattactatatcttttaaggcccagaatatttgacaattaaataatggtcttctttctaacctgtggaccaagaacatcaatgagacattaggcagcatcagtcagtggctggggctgtaactcgtggtggggcgagcgcctggtgtgcacacagctctgggtttgaccctggcctcctccccacaagttcgaattttgccaaagcagagaggggtgctggataaagtgtgcgctacacacacatgaggactgaagctcagatcccagcacccacttaaaagccaggcagccctggagaccacctgtaatctcagcactcaggatgtagagacgtcctgagttccttggaatccctgggaaagctggctagcagagtagctgaatgggatcatcaagctcaggttccaggataggccctgaatcctcacataaagcggagagcaaatgaggaagtcaccaacctctggcctacacacacaaaccctcatacatatacagccacacatactcacatacacattcaaacatacatgcacacatgcatgtatgcacatacacactcagacacacacacattcacaatagatttgcacacatatgcacacatgtacacatacacatacttacatacacgcacacatatacttagatacactcacatacacactcacatgtatacatgcacagacacacataatcacactcacatgcatacatacactcacatgcatacatacactcacacataaacacacatgcatacacatactcacaaacactcacacacgcattcacaaacacagtcacacactcatatactcatgcactcatatacacacacacacacatacttgtgtgttcaatggctctcataagcacagatataaaatcccttaacaaaatatcagcccacagagaagtaatatataaagacagtgcatcatgacacacaagttttatcccagaaaagcaaagttctttttaaaattataaaacagaagcattttaccatgtaagcagaataaatgagaaaagctgcatggctctactcacagttacataaaaattattagacaaaattcaatacccactcaacaaaacttcttaatcagataaaggactacccaaactgtccagccaacatacagttactcactaatcctgaacgttaagatcacaggtgaacaaagttgtcttccgatgatctctcttcgttactaagtggcattctagccagtgcaataagacaggaaaaacaaaactcacacagcttgggaaggaagaagggacattgccatttttcatgaagatcttactggcttgtgtaagaaacctgcataaaaatgacttcagtgagtggaatctagcagcttttatgacacgagattgggacataaaatacttctatagaaacagccagctggaatgaagaaattaaaaagtagttacattttcaattgcataaagtataaaatattcagaaacaagttttgtcaaagacattagcataaaaaaataaacaaaacactgagagaaacgagatgacaccaaacacagagcaaacttcttggtcagtggaaggaaagttcatacagtaatggtatcagatctccatggtctgctctataaaatgagctcaggcccaaccaaagctacagcgggctgttttgtagacactggaaactattttaaagttgtgtgggcatgcagacgattaggatagtccaaacaactctgataacagagacgtctgggagtctcattatttgattacaagtctataacgcgccaggaactaagtcagtgtaccattagcccaagactacataacagtcagtggggtagcacatagtagccagaagtgggtctcatgagcacgcaaatgatgtgaagtcaaggtcatagaggtttttcaaagagctagagacttacatggaaaaagccaacttcatgctcctacatcattccacccacaaagatgaatctaagatgggtcactaaagctaaactttaaggggggctaggggctgggcagagtggagcaccccttcatcctggcactcgggaggcagaggcagttgaaactcttgagtttgaggtcagtctgatctacagagtgagcactgggacaggcaggggagcaggagagatgactcagaggtagagtgtttgctgtgtaaacctgaggagcagagcccacgtccccacacctgtgtgacaaggatggtggatgtggtctcacctgtaaggaaggccaagacagagaggagcagagacaggatggttggtggagcttgctgttgtcaaaatatagaaaacagataaaaaaaacaaacaaacaaacaaatcaaaaccatgaagtctaggttcattgagagaccctgcttcaaaggagtaacatgggcggtgccagagggggcacagacatgcaacacacacacaggcacgtgcatacactacacacatacatataaaaattgaaataaaatttaaaataaagttaaacaacaaaaagactatatagccttctagaagaaattttaaaatgcatttgttgtattcttggattacacaaaattttcctaaggaaaacacaaaagccacacattgtaaaatacgaaccaaataaattagatttttcaattaattaaaaactcctattcatcacaaaatgcagttaagaatacgagaaggcaaggcatatacaggatgaaaatatacacagcaatgcaagtcaataagaaggcagatggataaacttctcaaaatgcgccaaagacttgagcagatctcacagaataagccccaaatgcaaacatggtactaagcattacttaagaggtgaacatcaaagttacaggagctgctatctcacaggcactataaatagccagaaaagtaacagtcaactaatcaagtgttatggaatgtgacatagctggatttttttttatattgctgataagtttatggaatacagacatcactttggaaaaccccttggcagttcctaataaacttaaacagatagctatccattgtgtgtgcaattctgcacctgggcatttccccaagaaagatgaaatcacgtgtctacaagaagagttgttgttgttgttgttgttgttgttgttgttgttgttgttgatcacagcagattgactgatattagctgtcccagtttgctttctattgccgtgatgagacacggaacaatgacagcatgtggaaagcctggcagtggtggcgcatgcctttaatcccagtacttgggaggcagaggcaggcgaatctctgagttcgaggcaggcctggtctacaaagtgagttccaggacagccagggtgatacagagaaaccctgtctcgggggaaaaaaaaaaagacagcatgtggaggaaagagcttatttggcttataagttacagtcaaggcatgagtgctgctcgctggcttgctcttcatggcttgcctagtctgctttcttatacacaccaggaccaccttcgcagaggtgtccactgtcgactcttccgtaactgtcgttaactgagaaatgctgcccatgggcatcccacaggccacgctgatggagggttccttttcccagaaaactctagtttgacaacttacgttgataaaacaaacaaaaacaaccacctagcacaatagcagaatcgagcaacctaaccgtctatcagcagaacagtgcagcacactgaagtctattgatacaacagaatgttacctgacagtgaaaatgaatagattgtcccaccctatggatgcgatctatacgtgagggttgaaaagaatgatgggaaaatgcatctctattgaacattctggcctctggtcagaattccctatgtaataccctctacttacattatatgtactatatgtggcctagcaatgggaagtacatggaaagatgttacaagtccctgtgtacagaggactccagcacccgtagatctcgatacccacagggaactggttgcaggagccctcaggcactgagaacaccatactgatgtatgcatcaatatgaatgagtcagaaaacattgactaagagaaacccaacacacaaatgcacatctggggctggaggagtagctcagttggtaaagtgcctgccctgtaagcacacggacctgggcttaatccctagaactcaccaggcacggtggcaagtacttataattccagtgctggggaggctcataggccggccactggagcctgcttgtcaccctccaggctgatgagagaccccgtctcaaaggacatggtggacactcgaggaacaactgccaaggctgttgcttctgactatgtgtacacaggcacacaggtacttgcacacacatgaacatgtgcatgcatgaacatgcacatatgtgaacatgcatacacatgaacatgtacacaggcacacacacgtacacacaaaagcaccttctacaggaagccatataaatgatgtttagggtaggaaaaataccggggcatgagaaatggcacttgttgctcttgcagaggactgggattcggttcccagctcccacatggtggctcacatatgtctataactccaatttcaggggctatgacgtcattctttgacctccaagggcattgggtgcacgcatgtggtgcatttccatacgtgcagaccaaactctaacacatgaaatagaaataaactttaaaaattcaagatgggataaataaaatctttgatgatagaaagcagagtcgtggttaaaagcagacagcaccaggtagaaattagctgggaaaggggctggggaatattttgaagaactggaaatgttctatatcttgactgtgtggtcattaaacacatatgagcatttattaagactcactagaatatacccttaagatctgtggatgtaaattttacctagttttaaaaaaaatcataatcacacttaaaatacctaaaacttgagtaatattacaggtgagtgaaaaattgtttctaattatatgctgctaaaattataccataaatgtgattcatagtagagtagacaacttttatattcagcacatgacttaaaggcagagagaggactgttccatggaatggtggctgttttctgcttagtaataaaggacgcacaagtactgttctaaacaccctctccccatctcatgccagaggagactaaatcaaagggaagtagctaggtggggggcatatggctatcaagtggcaaagctggtgtaagagccacacatctgtctacacaattcaggaccaaaagatggcgcagcctgtgaaggtacttctgttgcaagcctggagatatgagttcaggtcctagaatccttttttaaggtaggagtaaagaaccaatccacaaagacatgacctccacatgtactcttggggtgcaccctccaccatcatcatgcattcgtacccagtaatgataaataaaaacttgaaaatatctacctaatggcactgtgtgcatggtgacttgggtttgttagactgcttcaaagaaacctcttgctgactgccccaaggctccaagacatgagactggttcagcatgattattcccagcttacagatgatgacagaggaacggtgttcctccatggcctgagaccctgtggatgggaacccccagttccagggctctaccaaggcccacccagccctgctgaaatcttgtcctctccattgtgttcagagctgtcgtgccctgatttctgcagcttgtgaaggcagctagccttccacagatgccagcagacatagggtggagagactgctcagagagcagctatggagtaacaggaagcacacagcatcaggggaggggagagggccttggggaactctgctgggctcacttcaggaaatgcaaagtgaagcattggtgatttaagcaaaggaagaattagggcaggactgggtggggaaaagtatctcaggtcacatggagcaacaacgacctgagggctagctcctagcaaaaccaggttgaggctggaatttgtcttgagactatcttgcattgtagatggtgaccaacccaccctaaactctcagcaccagacttcctcctcctcctcctcctcctcctcctcctcctcctcctcctcctcctcctcctcctcctctccttctccttctcttctccttctccttctccttctccttctttctcctcctcctccctctccttttccttctccttctcttctccttctccttctcctcctcctcctcctcctcctcctcctcctccttccttcttcttcttcttcttcttcttcttcttcttcttcttcttcttcttcttcttcttcttcttcttcttcttcttcttcttcttcttcctcttcttcatacaaggtcttatgtaacccagactagccttgaactctctatgtaactgtgccagctggttcttgtcaacttgacacaaactagagtcacttggaaaggggtaccctcagttgagcaactgcctccattagattggcctggggacacatctgtgcgtgttctcttgactgacgattgatgtcagagagtctagtcctctgtggatgctgcagccctgggtgggtagtcctgggatgtattcgaaagcaagctctccaagccacgtagagcaaaccagtgagcagtgttcctccaaggcctctgcttcaggtcctgcctcctccaggttcttgcctcgaggtcctgccttggtttccctcagtgacggactgcagtctttacgccaaacaaaatccttcctccatgtacttcttttgtccaacgttttattcacagcaatgaataaccaaacgaagacagtagttcgacgttgactttgaacccctactcctctggatcctccttagttcttccttcaacagctacgtcctaaggacggtatttctcccatcaccctcaagactctcagccccatcagaactctttgcttagctctacattctttgaaaatttatatacactctctcctggaattcctggctcactggccaagctctgggagacctagaacctgctattcctctgttatttgtattcacacctgggtaaccgctaccctgacctgctaggcagacttcatttccccctcttctgtgcttgcacttcatgccggcagcctaattctaccttacagaaaagcttccccgaggctgacacgtctctccctgaggctcataataagctcttaaagattctaattatctcagttcaactttgttccatgagggctgaatggcaggcttgacacaggctggggagggaagacctcttgtcgcctgttgaaatgaaggcacttaagtgtgatcagtcctccgagactgccttgtctcaaaggtccgtctctagcggggccaactggaacagagaacttagtctatgcaggtggcatattttgtactgtgaaatcacatcccgaaagaagctaggacaacagtcaccctgcacataatacaagcactcggctcacctgcatatagcagggtagctgggggggggggtatttttaaatggcaaatgacataaagttttattgtattaaaatcctgaaccctccaagtcgtgatgggaatatccaatggtgtggtctttaatggcattctgagctcagctctacactgactggccggggaggagacggtgtcaatccaaatagctcagtcatcagaggaagcgagggtgctgttcaatttcccatctaacctccttctcacctcactgctctccactcaaggaaaaggccattttctccatcttctcagtggcaagaaaggggatagagcattaggaatttttaatggttttgtctgaggccatttaaaatgaagctgaaatgccagtctctaagactggtggaggaggaagtgggtgacgagtgggaatgaactcaagtgagctgaggtattacagtccccagtgatacctcgggatggtggagggcctccggcttcccccagtgaggataggactgcttgctaatcctcccaaaatgtagctcttccaaagtgtgttttgtttcctccgtgcatctctctctgcactgtttccgagtgatttgtttaagcaaatatttatttatattcccccgaatatattacaggtatctggagggagagagagttcagctcttctgccagagactattcctcacagctgagtccccagaatccaagacaatgaggtttttagtgtatctccaggtggagctgagctgtgatgtatgcgctctacggtgactaatttctctgtgtttcacggcccctccgcagggccagaagaagcaacagaggaacgctttctgcacagtcaaacccgacagtgcctctcaggcctcatcggccctccatggctgagtttcgaagctcttcattcccggggaccccagagcacagtcatatccgaggctcattaagaccttataggatgaaaaggcctttgattattcagagcagtggatccttggggaagcccaatgcacaccagtgctcacctgattctggacttatattgtgtgtgtgtggcctgagggagaaattaacagaggcgcaaagctcaggtgtgatctctcacacttccctcccctcaaatgcttgctggagctgcttcttttccatttttgtttgcttttgttttgtccctggctagtgctaaagactctcctctcgtctctatttcccatccatttttttgtgaatacaatttctctgagtttttcagcatatcgtctttatcttagatgcaactaggcaaccatttccatatgtctctttccacccatacatcacacatacacttaaacacacacacacactgagtcgtttatgtgaaccctggcttcctggtcaggggccagctctccctcctgtgtcataaaagccattcaggctccggaaatctcttattaaacagagtagaatggtggctcatacctggaggacagttgagcattcaaagccaggctatagtgccacactgttcaaaaccaacaggatgaggccactgaggccagaaaatgagagttcattcctacagggaacaagcctggcccagcccctttgctcacctccttcatctgtgtatggcaagggtcagagggctcgggccacctttccttggcccggggcttatcaagaagtgtctttaaaccttctgggagaggatggcacagcatgtttccctaataccaaatcacttggccatcaagccatggctaccagtgacagcccatactaactcccagacagaattgtgttcaagttggaaaaaggcttccatgagatagaccactgattgaagttagtgaggatttaaacatgtttcccttttaattacaaaagtaaagtgtataatctttaagaaaataatcatacatatagtcagggatacaaatcagagactgtttgtctagtacacacaagggcgttgtttgatttttagtcacacacacacgcaaacacacacacacacacacagagccaggtgagatggcacaagccagtatttggaagcctatgccaagtcttgaaaaatgaaggttagcctgagctacagatagagtctatctccaaaaaacagcaaaacaagcaaacaaacagaaaactaaacaattaacaaattcatatatgatatatataatgtacagtaagagcctgaagtgtgtatatgctttgcagtatctatgccttgctccacagagatggttgtttagtgattttggtctttccatatggatgtattaaaatacacgtacatatactgtggaattgtttttgtttaagaaacaatatcctatcacaaggctacctgcttttgaaaagtaagttaattgtaagtaataattttaacgtcgatagaatcccaacccttctcataggatgccatccctcccagaacagtgtgcctcccttttgtatgtatcattcttatatctcatacacacttgatcttgggcatgttttatatattgactgagtctgttccaagcctgtggcttcccctttacagtccccagagagtgggatcctgtggacgttgtcttactagagtccccatggttctgtacaccaagcattccagtgactgtttctcaacgtggtttgaactagtaggtgcattcagtccttgtttgcctatgcccctctgcctgtccctgttctctcttaatttgattcttccagcagcttggcccagaccagatatgtctgaaaagaaggtgatttcagcctttccactcaacaatccctatgggaagaggcagcgtggggcagggagggtggtctgagacacctatgtctattgcatgagccaccaggaaggtagagtctacgtgtagtgtagggcacaggcaagaagctacctgagtctgtcttctctgcaagggggcagggggcacagatatgggaagggagacagagtgggagaaggaaagacctggccgtttgactagcggagaactaccacctaggacatggtgattgtatttccagttagctgaggttcctttgctcagttcagacataagcaggcaaagcaacagctcccctagtgtctgcagctcctccagtcaactcccagctcccagaagctctctgtggctcaccactgtgctgcagttctcgactgccagcggctctcagagttaccagtcctggttactggcagtaaccagtaccagcaatctttggtgtaaccagccaatggtgcaatgaacgatctcaatttgctggtagaaactgccaatacacaaagtagaactgactgagagaaaagccactaggccaggtgtggtggcacacagctttagtcacaaggcagaggctgtcagtgctgcttacacaaaaggaagggtgcacacacgcatgctcagagtcctgctggctaactgcagacctttacagagtcatgccagtctgcccagacatggtgggtctgcctgctctggctgggctgtcaggtggtagaagctaggctgcttgaggatattaaggattaaaggagcaggtcacggagaggctgtgccatgagtcacttgggaccacataggacaccttagcaaagtctcccagagcagtcctcagtcatctcttagaccctaagattgaagggaagttgggacctagtcttggccccagaagatcctgggaggggtttggatgtggtcacagaagtggtctagatgccacaaagcctggcaggatgcagagcctcattgccctatggcccaggtttctgtgagggcagcagggttgtgggctgtcagagaccaagggaggccccaggtaagtggtaagatgagaatagaacacaggtccaccctggtgcctggactagcctgggctttcctacattttagtgatccatctataaaattgagttcacggcctttcacagctagaaggtcagacaagaggttatatatggggattcccctcattctggaaagagctgcatagccaaagggtcaaatgctgttctgacactctcaagatgagagtgagtgtccccatctcattatctagacaagtctgactgtaggatctcctctctccacagggcagtctttctactcccgggtcctggagaactgcgagggtgtggctgactttgatgaggtaggatatctgagtccctgtcctcacccctctccagcaggcaccctgtctctgcccgatgcgctggtcttaaaccctgggtggcttgtgtgcagcatgcctcatctctgagtgacttcctgggaggagcaggtaggtggttgtgggggagccgccactcagcataatcccacaaagtgaggacagagtggagcaatggttgccgccaggtctgagcccttctgacccctgtcgagaaaatacccaccagatttctaaacctcagggtgagtctctctaaggggtcagcggggttgccattagggactttccccagggtctcctggtatccttggaggaaccaggccaccagagcttcagagatgcccaactcacacaagactctcccttcctaagaacatcagggtatctctcctgctatgttttcagacgcatgcgcagtggttctccccgacccccagaggtgtttgtttgtttgtttgtttgttttctgaactgtagactcagatcactgagtatacaaatgactcacttcagtttatgtgccacatctcattggcccctggaaggccccgtccctgtccttcggtatgagtgtatacatgcgtgggtttctccctggtcctcattctttcccctctaccccacttctaatgtagtcagcaaatgcctcttgctgttctatacattctggcaaggtttggactgctgtaagcatatgtgtgtttgtttacttaaatgacaatgtgttaaatattttctgttctattttccactatatactctttctaagttccatctgtgttgcaaagcgctgcttgggacacagccaacagtgggtgaccaaccactctggtctgcccgagatggagaagattctagaaaaacagaccttcagtactaaaacaggcaggtcctgagcaagccaggatgagctaattagtcatgtgctctctaccagggctggttcctagctcatgccattagaaatacagaaaatggtctccatacctcacctgaacctgtgtgagtgtcttcccaggataagcactagaatcaggaattaaacacctaaggtgaccgaccaggcacagtcactgcctgtgcttctctcagcagagagtgacccttcctccacccacatcctcatctatggttggggtttccctcccaggcccctggttttcaccaggccaacagagatctctcctggttgctaggggacatgagtatctcttgagaatgtctttagcctctttcttttgcaaattgtcaccttcctagctgtgttaccagtttacctcttcttatcaacttgcagatcttcttagtatattctagttaacaatctcggttgattttagatgtttaaaacacctgcgtcagatgtagctcaattggtagggtgctttgccaagtatgcacaaagcccctggagtccatttccaacactatatataccagacatgtggcgtaaacctgtaatgaagcattaagaaagtagaggcagaagttcaggtcatccttaactacatatcaagttcaaggctagcctcagctagataagattctgtttagaattagatagttgggggggggagacctttttccagtctatcaactatcaatgaatgaggtccaaagtccaactgttgctttgtggatttctcccaggtactctgtgagctatgggttttatattgtgaaaccgtggtagtagttgctatatttcataatttctcacttatgcataaggttttccttcttgtcccccgtgatgttttttatattaattcctatcttattggatactaagattgatacctaagtatttgtggcacatgactgtaactgagtatttgatagactgaggtaggaggactacaagtttgaagccaatatggagtcttccattttatacacacacacacacacacacacacacacacacacacacacacactgcaaatttcagcttatttttctaaactacattttcaaattttttattttcattacatccatatgttcagatggatcttctcttagatctctttatccatctgagtgtttctggatgtttttttaagaccttttttttcttttaatgtgtatgagtgtttacctgaatatatgtatgtgtaccacatacatgcagggcccacagaggccagaagagggcgttgggtcccctggaaatctagttacagatgctgagagcccccatgtggtttctgggaatcaagcctgggttctctgccggagcatcaactgcttttcatctctgggccatctctccagccctggtgttttcctgtttcatgagtgacaatattcccatctctctagccctggtgttttcctgtttcatgagtgacaatattcccatctctctagccctggtgttttcctgtttcatgagtgacaatattcccatctctctagccctggtgttttcctgtttcatgagtgacaatgttttcatctctctagccctggtgttttcctgtttcatgagtgacaatgttacccatttccatttacttctatggtacgcccactaggtttgtacccatcagcaccttgttttagattacccatttcccattccttttgtccactcttatccgcttaccaaggctcaatgaggcttagtagaaaggttataaccatgtatgcagtccccttctacaatgaaacatcccatcggtgacttgcagaaatcattctgaggagtttctcatttacatcagaaattcaggggttccttgtgcctctctggttcctctgcttcacccagcccttggagccggcactactgtctccatcagacatcctttaaccttgtatcttattaactcctgatccaggaaatcaacaccctcatggagacatagatgtaggcaaaacgccaatgcacataaaataaaaattattaagataagtctttcttatccatataatgttactatttgttacagaaaaaaatctaattaacatgctaatgagatgggtgtgtttgttggtctaatacaacaccatccaaaaatatactgctttggtacactctgaggaataacatgaggaaaaaatactaaaagtctttgcttccgtgattagaacattgtttctctgagagcaggagcctttgtatatacagtggaaacattgtaatccacactgtagagcggctcaggctgaaacagggtttgggcggtgttcatgtgctaggatgctgtgtgtgttgtgtgttcagttcgacggctgcagagaagtggtggcaggcagcacagagcacaccagacacacctcacacttgctaagtgtttgagtttcaattggctttggtcacagcatgttcagaaaccttgactgttaacagtgttagccattcccagcttcagctgtgtgacttccatgtagggtcccagcctcagctttgcgagtttggttagattctggattctagccttgaggttgtgcagtttctttgacttttctttgcctgggccttgttttacttttgaaagatgaatagtctctcaaaaaagaaaaaaataaaacaaaacaaaacaaaaaaccaaaacaccacctctgatttggtttgagagacggattgacagttaagagaaatggctacttattcaaatgacctaggttcaattcacagtacccacgtggcagctcacaactttctgtagctctagttctagaggatccaacaccctcttcaggcctctgtgggcattgtatgcatgtggtgcatagacattcaggcaggcaaaatattcataaattttaaaaataaaattagaaatatctgccacctttacttcttggatctcttgaggatcccttggattttgttctcttcttttttggggtttcctccaaaggagtcgtcattcagtccatttttgcagtatgccttccgaagctctataaatctgggaatatctttctttcttactcaagtttgagagttctactagatcaggaattctaagtttaagattctttttctcacaattgaaaatataattgaaagtataattctatgttatggttaaaaaaagcctgctggccctcagagtcttaaagctctgtgggaaatctttttttccctcttaaaaaaaaaaggaaaaaaccatgactctcataccatatatatatatcatgggtttttttgcctttgaatatatatatatatatatgtatatatattagtgatagacttgaggttcagttgttccatctggctgaggggtcaacctcaccagttatttttcctcctgggccaattctatgtgggagaactgggagttcagacccagggctggagagaggaaaagcaaggtcttatcttgggctacaacagcacaactgcaaggccactgccgccctactaagtgtgtcctgcagtcctgggatagctggactcctcgccattcctgtgggtgttctgttcttgttttctctttctccttgttgtgtagctttcaacgtcagcttagcttcggttgccacatttgtcaaatcatgctgggaacagatatgcattctctctgggagacagcaagcaaaaagagggaaggctgtgataaagatacccccactgcataaagaactgtcatgaggctgcagccccactgcacaacctgttgtctcctatcctcatctcctttcctcattcaggtgatctggatcagtttctcatgggcctgccttctagggcctatagcaagcacctaactccctttcaagacttctaggggccctatcagctcaagtcccaggcaatgagcaacctgatgcccctttgaaggacaatgccacccctttccatgccctgcacccgggacacctgagccacagataatacatggcattcaaagttaatcaccgtgtccttcctctttccagagaagcccgacacggatcaggtagaggatgcccttgatgccactggacatctgcatggggtatattctgagtgtcagaaggaagggtcccctgagctagtgggagaatagggatgtctcatataggaactttacatggggctgcctctgggacagtgctcagtgaacacagggaagaggcagaagccagggagctatggcagacactgacagggtcaagaaccacccccgggtggggagaagcttgctcacattgctacctggcctttaggagtgggggtggtgaccaggaggttcccggttattgcgtaatggagacccactggggtggggtggggtggagccaggagtgataacaatatctgagcagtcctcttccatctactccccatgataactgatgaatgatgacactccgtcccacagagtaagtatcccttacaaggtgacagaatagaagtagccaagccaggattctaagtgaacagcaagactagatctgaaaacctctctgaggacaccaataaaacctgtcccaggccttctgattctggctggcttgttcacaagaaccaggcttccctcctccctctaaaagggtcccatagcctggctaccactggtcacaatgcacaaggcaggcgggacaactcctggacccccaaagagatcacagagatatatcctagcttcaggtaggaaattccccctggctatccctgataggaactgcccatcagatgtttcagaacaagtctgggaaagaagctttatgaacccttcaggggtctctctgtccctatattatgactagggcctttgggaactggcttagagagagacatggggggccttggagtcaggagacctgggctaccttccctagggtgaggctttgcttgattcagacacaggtaggtgagccactttgactgagcaacctgagtgggcaggaggtagctgggaagaaaaacaatgctcatcctaaagtgatggaaacagagccaggcagtgtcccctttcctagggactggaacccgagatccctcattgagcccgtggctctgaagaagctgaggcaggaggcaaggctgggggtgctgaaggagctgagagagcatgtcaagtctgtctaagccccagcctggtttggttttaacacgggcactgtttggaccccatgccccaccctaacccctatcgcccacccccgcaccctcaacctcacccccactccccacccctacttcccactcatcccctccatccctgagtaggccccaggccttcgagattctggctggcttactcaagtgaaccaggtttccccactgctcaatgctaagacctgggcacttaaggggagagagcgttgcctgagctttcctctctgtgtaacgggcttgaagaacaacacccccaggtcagaaggagccatgtcaggatttgaacactggtctgtctgattcctgtatgcagatctggaatgctcaaccagctagtgttgtgcacaggcctgtagctctagcctttaggataagcagtaggtaaggtgcagacgacctacaggcaccatagaggtcacttagtggaacttcactattttacagcaggtgaagtgggtctgtgtggggaaggggctccccgagacttccaaaggaacacaaacataaaactagaacccaggtatttcagctcccagaactgtttctattataccacaaatctctacagaaaaactcaactctcaagttccccctaacagacacacaaagcaagagggtatgtgtcttctgaggatgctagccttctgacaggacactccacacctagtcagcaggcaagccagggctaattcagctcatcctcccacagatatcagggaactctgtggagtcccagatccctgaggctgataggatacagaacaccatgccctggccactaccagccaggttagcccaagtctgtagatggtaactggacactcaagtgcctctaagactgttccaggcagagataaccttttccttcgccaccactagtacatgtcccccagctcctgtaaacaggcccattgcatgtgcttcaggttgttctgtcctcagagcctgaaaacaccctgcatccctgcacctctgcgaccctgcatccctgcatccctgcatccctgcatccctgcatccctgcatccctgtatcccgcatctctacatctctacaaccccgtatgccacacagagcacaaagaatgctgagcaaacatgaggtggcccgtgatatctagggcagcagtgtttggcttagcaggcccagggtcccaaacttaggggttgaatgaagcagaatattaaatagtgagttggctttcattggcaaccacttttctgggcacttccagaaataaaaaccactacccttacctgcagtggccacaggaagagacttatgataatgctgccaagctggagaagtgccctatgtccccagaagcctctgcagctctcaagtgtctgtcatcaagaagccaagtcttgcccagatcctggaacaaacagcactgtaataacaattataataaatggccccattaactaaacacttcctgtgttctggctgtctgccaaaagcccagccagcctcaaagttagccccaaaagaactcactcctgctatcacctgatgggtgtctgtactatagtcccttctattacttgagacttgtttgctggcagtccactgtgtaccagaccctgtaagagtgtgaggaagccccgtggaccaggcagtcacctgtgctcctgctctgattaccctgatagtgaccatcatgacattctgggagtcaatgggaaggagggggagcaggagactgaggcaggggcatgaaacccagctctgctgccggtgagaagtgatcttgacccagaccttacaaggagaatcacgggcagaatggggtaatgtcacggttatctacagctatgtaacatgcccccagtggctgacaacctctgcacttctgattctgaggctggctctggctgtctgctggatggctgtgatagtgttccagcatctatctgggtcctttctgtctcccccagcctcacatctcccagggcctcccttccagcaggatggcctggacttcttcatgtgccactgatttccaacataaggaagaatggaagtttccgggtctaggtgccacacagcctcatgattgaaaccttttgttgctaaaaggcataaggccagcctagactcaaggtgaggtaacacagaccccatcttgtgagaaaagatgtcacagagaaaaaggagagagggggaccaggagcagacacccccggatatcagcagagtcatgcttccccagtgtttaccttgtgccggagccaaggttaggtggtataccatccatactgggaagtgtggtaacttatccaacttctcatagttgttaaacatcagcaccaggggttgagcctgtatattctgcctcttagtactccattgatctaattaataaaaatcaattaataagctacattactgagcaaattctaaatctcagtgtcgttctctgtgaagtgaagttaaactgttagaacactaggtgtcaagtggtagcaggtacccagtaggtggtcagcactcaataaataaatgatttttgcagctggcaatctagaaggacaatcagaaccacgggcccctcctgaaacttggctctctctaatctacctggctcaggagacagcccagtgtcagggagtaagacctgatctaagcttgaagactggagtttagtcctgcctccaccaccaatcagctatgtgcccttggatgcttctctctcaagtcctctcagcagaagggcatctttgccacattgccagagttgttgctagagagcattggcccgaggtttactatcgagatagaaacctccccacataaccccttcccttcagccagacacttcaggagttgagcagcattgtctggttgttgggggtatggtgagcaatggctcctgggagctcccaagcccccaaactcccccaccttatctggctgtgtcctcagcatatgtgtgcatcactgtaacgggtacaaagaaggaaatgacagccaaagggagacactgagaaatgaaatcaggatgaggacaaacaaaagagaagacatgggaaggccaaggcagataaagtgtgaaggtggcagaagcagagcagagaagggccagggaaacatattgacaacatgcacagagccttgcaggagggatggagggcagggagcgggaagcaagcttgaaccaatagtgactttcgtttctgccgtgctatgttctctttccatataacatcctgtcgctagtgtgattccatttggttcttttttctttccttctttctttccttctttctttctttccttccttctttctttctttctttctttctttctttctttctttctttctttctttctttctttctttctttagtgtttttgagacagggcttctctgtgtagccctggctgtcctggaactcactctgtagaccaggctggcctcaaactcagaaatttgcctgcctctgcctcccaaatgctgggattaaaggtgtgtgccaccacgcccagcttccatttggttcttgcaacagccttgagagatatatatttgtcttagtctgtcttctgtgtctataacaaaataactgaaatggggtcatttctaaagcatagaagttcatttggctttctgttctcaaggtgagaagtccaagagcatggcaccaacatctgatcaacatctggtgagggtctccttaatgcatcgtagtatatcatctgacatcacacagtgaggtggggcaagtgccacatagggcctaggatcccacatagagattctaggtccatcgggatcaaagctggggaccaggagcctcataaaatttccagaaatcagtctaatgagcaaccaggagtgagaaccaatgagagacagagacagggaaaggcagcgatacagaaagacagagacatagaaatacagaggcagagacagagaaagggagagacacagacagacagagaggcagagacaggcagagaaaggcagaggcaggcagagacctagacagacagagacagagacagagacaatgcagagaggcaggccattatgtcctgtcagctcttgtgacccactgaactacacctcagtggggacaagcagaagcccgctgtgtctctctgagtctcctgtatccggtcatcagttcctccactgaccccactgttcccactgtgtctaaaaccattctcagggtcaccaccagcttccccgactccttctttcttaccagtgccaggaaccacccatagcccccaggtggaagaaataccttacctgcttcaccccaaaacaacagcctcaatgggccttccgtaccctcccctgggcccacagctaatgagtcaggcctctaccaccatgcagtcttgtctaagcaactcaattaagaaagcaacatgcttcgtagagccgagttgagctgagcactgcaggcctcagacagcaggagccagagctgtgctgaaacaagtcctggggctgccaggagccccacctacctctagcctctctccatcccatgctcgcatcatcagcgttactgtcgctgtgatgaaacaccgtgaccaaagcaacttggcggggaaagggtttatttggctcatgcttctacatcacagttcatcactgaaggaagtcagggcagggacctggaggtagaagctgatgcagaggccttggagaggtgctgcttactgactgactcactcagcctactttcttatagaaccctggaccaccaacccagaagtgaaccacccacaatgggttgtgccctctctcattgatcaccaattaaggaaatgccccacagacctgcctacagccccatcttttctcagttgaggttccctcctcttggacactctagcttggttgtcaagttgacctaaagttaacttgccctcacggtttccccgggatctggcccatcctgggaggagatgatctgaagggagatgacagtgagcagccaggatggccctgtaagcccaaccctgaaagtcctcagtctgggagaaggcagtccagctgtggagcggcaggcttacaggggcagctcttggaagcttctgctcagcagtgtccactcggccaccagcagaactctgcctcacctctacttctcagagctgtggctacaatgtccatgaaactgggcagacaccagcttcctgggctgttagaaaagctaaaaaaaacaatatgcttaaagacttcagcctcctgcataatgccaagttttctgtaaacattattatcactgctattcctgaactgttgactggtctgaactgggtagggaacataggggacatttaaaactgaagtcactgtgctctgtctagtctgtgaaaacccctggtaccgtctttcaatagctcctagcagctcttgatgcctgccagtcactctgctaagccaaagcccaaccgcactggaggtgttgctcagtgggtagggtgctcacctaacatgcaagacagtgagttcgatccccagcacccaataaaacagatgggatggtgggagcctgtaacccagcgcttaggaggtgggggatgttcaagttctgggtcagcctggaatacaaaaccagaaggatatagactccagcccacgccagtttttttccacccttttcctctgtcccagttgttcctaccctgctccctttcccacaatggcatgatcagccccgtgttcagacaggtggccttgagagggaatgtggggcagggtcaatggaggtgatggagaccacaggccacaatgggttagcgccaatagaaacaaacatctctggaggctgggttcattgagaggctcatttaattaagaggaataagggctatttaaacctttggagcgtgggtagaggcttcagggtaagtgaatatcattgggctgagccagggtcctgggatgtctcatttgcataaggaagaattccagatgctgctggacatgaccttataagggaaagtttaacctggctacctgtgacctcttctggtggggccaaggtagaggcacgggtagatgtgagccaggatatgtgcaggagaggaggggagatgcagacacggacacggtcctactcctgcccatctctggtagagatttccagggtttggacacacctcaaccccactcttactcaaggcctgctccccacagctccatggctccccaccccacatatatcctcatgcttgatgcaccaggtctggaatgaacgtgggtcccattcaggtcctcttatcttcctccagctttaacggggtgtgggggtgtggtctctacaatgggtgtggctcatccttgtgaaacaagttttgacctgccttggatacagtcagcatgcagggggccaggggaaggggtggcatctacaaacttggacttcctcgattatgttgtgtagtgaattctgcgagggacctgagtggcctgtgtcatggtatgcatcccagccttgagcggtggctctaacgcactgtcccttgttactggagggtcagccctacggcttcccgggacggcaggcttttgagcgagtcttcttggtggctttgcccagcttggctcacagagaataaagtctgtatttaccaacagaggcatgccaggcctctccctgctcagaaggcagggtctctggggggtcagaagtggtgatcagggtgcacagcaggccattggctttccttactggcacacaggggtccctaggagcttgcatgatcctgacattgatggctacaagttatttctgtagagagtacaacaaatgttgcacacagatgaaagtctttctagcttcttttcttcttccccaattgttttgttgttccaaaagggaggaaggctaggcaaggactggaatgatggagccttgaggaagccctaggaaggtgcctggctctgcccatcattggctttccctagagaatgactccttttaccatctgcattgggttccagttgccactcttcgggcattaggaaaagacccactgaatttctaatccatccgtattattaacttagagatgtctccaggggtgtgaatggagaaacagaaagtgggacagaggctgtaagtctgacccttataacccgagagagctgcagaacgtgtccccattgttcgcactgtcaccatggagggtgaccagggagagcctggactcatccaaatggcttatgtgagttgtgaagtctggactccagtcagcttgtcctgaaaccagctcccaccccaccggtggtctgtgtttactggagcccacccacaccctggccacaccaccctcctcagctgtcacagagctgggaggcagaggaaggcacccacagatgggagtcagaagcccttcttaggcctaaggtcctccacttaccctgcgaccttggcagcctggacaaacctctctagcaccatctttggaggaggagtgggtaagaagacccaccacacaacgctgctatgacaatagagtaaggatacagatgatttgcccctggggatcctggcccatgggaggggccaggctggctgctaggaggccccaactccttgctatttgcccccaaggctgcagctgtccctctctccccagacgttccggtggccagtggccagcagcatcgaccggaatgaagtgttggagattcagattttcaactacagcaaagtcttcagcaacaagtaagtggggaatcctgggggccggcctggttcttggacctctctttttaggcttaaaacagaaactctgtactctgaggccatctttaaaagcctaagaggtcttaggctggtggtcttggctatccattttgtcctttgtggggtcctcaaagtaccctggcccttccatccactgtcaagcaagagtacctcactctcctgtgcacccctcaattctcctccccatttacactccatgcccctctttttgcctctcccttactcgtactggaagatggtagcccaccagagaagttaaaaggctgttatatcctgtggtgctgaggataaatgtgtcttacagaggctgccggtgctgtggtttaggaggcagacatggtctcagacccttggtccagtgatttaagatgtgagcctgagcaggttacataacccctctgagttcactatactcatatgaggaaaatataaggatttgtctccaaacagctatgggaattaaatgagatagatctgctcattcatttactccacaaacagtcatgatatgcaaactgtatgtcacgaactgagctaggtattaaggagagagatgcctaacctcctggagcttccctcctgtgaatgaagttcacctgccacgtgagtgttatcccacaagctgatggatccaagtagccccgttctctgtggttgacgtacacattttagaaggtgctgggatggtggttaaacaaaagtgagatgagacactcagccttggagtcaaaaatccattgctcctatgatcatggctgaactgtaaggtgtcccaaaagatgtgacagcgctagttcagtgaagcctctgcgggactcagcagtaggaagggagtgtagacacagaaagctgacctaaccctggatcacattagaggtgatctcaacaggggaggcaaagggtctactctttccagtagctgtggctgtctggagtgaacactctaatgttttccttatagcaagtagatgcaaacctcaagaggaagtcctagggacatttagctactcacccacatgtccattcatctgctcatccattgtttcattcatccatctgtcccatcccattcatgaatcctacctattcatgaatcctacctatccattcatccattaaacacatccattccattcacccttctgttcattcatccattcacttacccatctcctcaccctctgcattagtcatgactgttgctaaaaagaggatcaaggcaaggctctgtcctccagaagtcgtttgtcatgggaagaggagaggcacacaagaaccaggctgtgtcactaggagaacagacatctggaagagccagaactctcaaacatctgtgctctctaaggaaatgttcagtgcccaccactgggggaggtgagccaaacagataaacctcaaagagcagatttcaggcctgctgtcaggaccacagaaagtatggctagggccagaagccttctctttgtctccaaagggtggcatcactcagtcagctttttctggttctacaaaataataataataataataataataataataataataataataataataataaggaaagcatccccaagataaaatatggctttcttatttggtgtgagacactctgtgattaataaggcaggggaaacagggagaagagaagggcccagtgcagactgagtggatacagaagaaagcagactcagaaaccggggagagaaccaaagaactccacccagggcctgtctacagatgccagagctctcaggagctcagtggtaaaacccttactgtgaaaaaagggaaactgaggctcagaggcacatggaggtcatgtgagaagactccaggagagcaggggcaggacatatgtcctccacctcctcttctaaccctctgtagctctcagcagccaaagcacatgaatgctgcagaagaatctgaagaagaggttgctgattcgccacagtgggcattgccagagcagacaccgaagcgcagagagcctggatccatcaggattccggctatagacaaagtaaaagattgaggaattttaaggggcattggatgaccacacagtgaatctaccaaacattaaagctcattttaggttttcctaaatgcaaaacagagggaagatagagcaaagtggcctatctcctaactgtgccctcccttcccccacccaagagaaagcaggaaagtcacatgggaccaggcctggtggaggatgaccattcaagccactcttggccaagacctaagatgtgaagaagagacacaggccaaccttggagtaaggtgcttggagctaggtgggggctcagggcttcctaccttggagttagagaagaggactatctggttctgtccagtggtgttagggactgccaggaggtaaagacatggtacaagggtggaaagctgctggccagggaccataaggtccccaagtgtcctagaaccagggctttctccaagaaacctggaactttcatgaaaacatattaggaagaggttttatgtatcctgtgtagccttaccaggactttaaggggcaatggctccttccaccaagaatgccagctgctctgaataattcagaagccaggagcacagtggcagccggactgagcccggggcacttgacaccagctcccaggggaggacgataaattattgacaggattctggtgcccagttggtgctctgctgtggccagtctgtgagcccatctgcacttgaggcctcctccccattgcccacctacctgataattctggcttctcccaggctactctgtagggtttccatgagggctgccctctttctaatgggtgtgcttctagggccacataagggatgtgtggtcagcctggggaaccaagacccagctagacagtaggttgaaaaaattctttactgagatatcaactgtccatttaaaactttattgttttatgggttacgatcttttatttattcatgtttatttttttgaggaaaggggagctgttttatacacacacacgcattaccaccaccaccaccaccatcaccacaccaccactttaagatcttcaagggtcagtgacagcctggctctgttgctagcgctcacctaacagagaagaccagacctggctgagccctctaaatgcaggtcacacacaatagcaaggagaagagacagtgaggcagagggcctgcagcaatacagagctggatctccacaccagcatggagggtgggggtggggggagatggcatcagaatctttaagaggaaaaaaaacagcacaagacttgcagaggttgcagaactagctaccatcacataactaccgggggtgaaggccccctgagggactgctacatctgattccagagcagaactcttccatagtctatgcctcctcccttatggaatgacagatcacatgtccttagagcttgacccagggggcaaggaatgggagattggccaggagggcggtttgctgcatgttgcaggcagtgaggtgtggactagcagtggaaacagattgcagtattaatactggtgttgccttccatttcctgtctggacgaggcttgaaagcttgatgggaggggtcatttcaaggattcgcactcgccaagttctcctcccaagcccctcccgagtctaggatctcagactgtaaaggaaaagaaatgtagaagacatcaccagaggctctctcagcaactgcaggggaatggctccctcctgccccctggggggtgttttgtaacattgcagcaccttagtagatcctaggcacctcctttggctactctcgggcgtttcagattgagaacaaatgtgcctgagttccagccctcagcagttgcctggcagggcttactggggtgacaaggactcacaagagcctgtcagcaaaggctcagggtaggacagcttctccatgtgtgccccaagtggcagtaacagcatcaccgtgcttgaaagtgcacatactcagggctctcccaccgccacctccagcctaaaggtgtagcctgcagagtcagcagatccctctgggggaactgttagaatattaaaattgggtgtgctgtgagtgtatgcactgcagaaaccagtgaatgctgcaaaccagcagtgacagcaggtctatgaggagttggcgcatccccaagactccattgatgccactgatgagccaagcacttgaggcctttacaaggccagtgcgttccttcatgcccactgctgactgttgtgatctcaccaacttggtgttctaccccttctctttataaagacaggacataaactccctagcagtgacttgggatctcctggaccccagctcaggactcagtgctccacccacccaccatgtgtatctgcaaagtgacgagaacccaagatgggactggaagcttctatggaacttctctgggaagaatcaaaaacccctaagtcttaacttagcacggggggatgggagacgtgcgactcaatgaggccgtgagcttggggggcaagcatgtcagaatcatctcttacagctgttcccactgtgtgctcttgacacagctgggaggactggagggggagacatacatgttcatgtgtatatgtgcacatgtgtatacaaatgtatgtctcctcttcctctcccaccccatgtgtgcacatatgtgcttgtgttgcacacatgtacgcaagacgtcaacattgggtgtctttctctatttctatctacctcatcatttcttgagacagggtttctcactgaaaccagggctcactgattgtgccagactgcctggccatcgatgagctctggggctcacctatctcagcctcttcatgctggagttagagatgagcacctctgctcctgaccttttggggggagggagggaaggaaggaaggaaggaaggaaggagggagggagggagggagggagggagggagggagggagggagggagggagggagggagggagggagggagacagataggcaggcaggcagacaggcaggcagacaggcaggcaggcaggcaggcagacaggcaggcagacagacaggcagacagacagacagacatactagggatctaaactccggtcctcactttcatgagacaaacatttcagtcactaaactatcttcctagcctcagaatttaaacaaacaaacaaacaaaacagtgttctcccttagtattttataagcaacaagcatgtttttgtcagaactcactcatatttgtcattaattagttgcgtcgctgtcccctttcttggccccacctctctctacaaacttcaagtagcacaagtgtcccccagattgcttccaagtttcacatactgtgtgttccttgaacctctttgtcacttctgtggaaatggcatgagttctctgtgggtccaggtggatgtaccgcaggaaggcatctctctgagtcctctgatccctcccagggcaacagctttccagtctcagcattgatcaggcacccaccactgctcagccattgaggaccctggtgtgtggggaaccgcagatggagtttaaatatagaatacacaggctgtcctgtgaagaccacaagtaacaattggagcatcaggtggagggcgtgtcggggggacaagcacgtcatttatgaagtgaaattaagatcattagcttagcttagaagaaaactaagacaagaaagcttaggtgagtttccctgggcagacaccacccatggaagcatccgagctgggtttctgctgcagagattgtctctggtgtgattctttgtgcttgtctccgctatacaactgaattaggggggactctgtggtcccaggagcttatgcacagcaaatgtggggtggatgtatgtgtggtgttggtgatgctagaggcctctactccagtcaggaagtagaagaaaggagtgcttgtgtagctagaggtctaggctgggctgtagctcaatggccaatcacttacttgtccagtatgatgcagagttcagtctccaacacacacacacacacacacacacacacacacacacaccctgacactgccacccccgccatcaccaccaccatcatcagaagcctcgatgccttcccaccaccttccattatggcatctggaagcttccatactgcaggggaccagctgcagtcccggtgctacgttccccatctctatctgtggacaccacttagaattctttcttcttcatttccaggggacacttaaggggtcagacaatctcataacctcaggttactgggctactgtctccagtaccaggctagggttttcatgtttctctcggtctctgtgccagccagacactgagatcagccttgctctggcgctggcaatgtcccttctgccactcacaggctgatagggaccttctgcatggtgctgcagaaagtggtggaggagaatcgggtagaggtgaccgacacgctgatggatgacagcaatgctatcatcaaggtaagtgtgttggacagtcccagacactccaccacccagtcacctaggagcctgctgcatctcccacagacgagggtttagaaccatggttctcaaccttcctaatgctgtgacctttcaatacagttcactatgctgtagtgatcttcagccataaaattattcctactgctacttcataactacaattttgctacttctatggattgtaacgtaagtatctgtgttttcctgtggtcttaaggtcatttgacacacaacccctcaggttgagaaccactggtctagacaatgctccatgactgacaagggaggcagcaggggacaccagggaggctctgccagagctgattggtatgaaggctggtgttagaaaccctgtggtgtggatgggtctatgccaagtggatactccacttttcccatgtgccaggtgaggttaagaaggttgccccccactgatgtgtgtctccatttggatccagctcaggaggggattagaggtacctcttaccatccaatggctagattgacccttgccagcccttctaaggcaggatcaatctagagattcaggatcaggatcagaaaatgcttctgctccatttgtccatttctgatcaaatcagcatgggcatgtacgtccccgagttaccctccaagtcctctgtggccactcacaggcagccagcaaggtggtgaggagcctgacccatggataggattcttggttagatctgtgtagcaactgcaaggtcagcaaacgtatatcagcctcacaggcttgttctagggggtcaagggcatacaaagaaggtgcttagaatgctaggtggtgtataaagagcgtttatctcctaccttagttttacccccatgcaaattaaggctgtgccttctagacatggtccctccacctgggttctgtttaacatctgcacccagatgtggtgttccactttctccagagggaaaaccaaggcagctccccaagactcccctctctaggctatcagttaaatcctcagaagagttgaagaaacgctaactgcacaaggttgtaggaagcccagggctgggtcttctctgagaagacatgctcagctaactgtaccactttgtcagaggagcccccttgtgcctaggttctaaggatgaggagttgacctagtctttgggcgcctgggaagaggagagtcaggtacaacagaatcagggtctcactgagccagctgacacctcaccatccatcttactcagccttattctctcatctaaactgaggtgggaaggtcctcacctagtcttcatagggagcgaaagtgcctcccagatgccacaggcaccagggtactgctcttgcctgcgcaactgctcactgtccctctcccttcagaccagcctgagcatggaggtccggtatcaggccacagatggcactgtgggcccctgggatgatggagacttcctgggagatgaatccctccaggaggagaaggacagccaggagacagatgggctgctacctggttcccgacccagcacccggatatctggcgagaagagctttcgcaggtaacaggctggccgtctcttcttgcccactgctctcaaaaggcctgggaagttggtgcctggagcccgtgccctggaaggccctccaggcctggctgtgctcagactgcagagctgagctgttatagaaatatttaagagttggaaagatggtcacaccatctctcacctgcctctcaaccagaggctctagccagaatgagaggccaggcctgctccagtcctgagggaagcaaagatcagagagagagagacagagagacagagagacagagacagacagagagacagagacagagagagacagagatctaatataagggggaaactggatctcctgccctcatcggagacatgggaaaagagagtgggagaggccttggtttctatgttctaagacccacagtgtcagccaggccccctggcagcctgacctctaccttggcccagtgaaaagatccctaagccagagacctgctgttgccagcgtgagactgacagtcctggtcaggacctggccaccgctctgttgtccaggctcttctgtgtctaagattcacatcttacaagtgccctgccccttaccgatgacagagggctttgactaggccttacctccccacacgcaggacttttttttttaccagggagaaaatgcaattgcattactcgaagtccagagggcagaactgaagctagagagatctccctagatacctgggatgctgagaacacacagcagatgttttatttcgacccaagaggtctggggtgcgttttgagaacaagcttccccctccagattccttcacagatttactcagcccctgccatgttcacacaggctcccagttagtgagctggaattgtgatgattttgtcacacagaccctgcctccatcaccagcctacttcctgaacacgaggttaaccacaaatacaccacacaaataccaggtcatttagtgtgagcccaagcctgagtgccagaggtcacacaacttctctcagcctatctactaacctataaaatggcagctatcccctcaagccttgctccaaccaccaaccggttggtgacccaaggggctattggaggtcataaagggagagccaagtgttgcacacggaagggctcatgagaacaagttcttcatcctggatggtgccaaacatcagaaataggttagagatgctaagaggaaggacggtgtaatacgtaacacaatggctgccgcctgaagagctatgtggggatgcttcagagtgggttctgggagcgcatgcacacgagtgcatacacacacacacactgtagaggaaggaatggtggtctgagttaggaaagctagctagctccatctggtccaccccaactctgccctcatcagctgggtgactctggcatgtcaccaaacctctgtggtcaataacaaaaaataagtgagttagaaggtagacaggctggctctcctccctctggcccccaacagagcccaggttactcggacagccatgaaagcagcttcccccagagggaagcgctgcctcaagtctctgccttcatccaggggccccttgtctctgcccacactttacaaaataaccccaaggagggaaaatgctgtcaagagacagcacaacagagtggagacagtaacacccaagtgtccgctctgatgtttggggacatagctccccaacagtaagacggctcacccatgcccacaagagaattagggaaaagtgagatgcttactatatatgaaaatgaggtattactaatgtgggcacttactaatacccattgtacatggaaggtaggttctcagccaacattgcctcttcagactccatgttaccttgaccccacctgtttcacctgtttctcctctgagcactgtctgaccagtgtctggtccaggcattgttaccaatctgagtcttatcccgacctatgcaagggcttttccagggatgccaaccagaggctcagctgtcctgggcaggaacaggatctctctctctctctctctctctctctctgtgtgtgtgtgtgtgtgtgtgtctgtctgtctgtctgtctgtctgtctgtcagtctgtctgcctgcctatctgtctctctgtctctgtctgtttgtctctctcataacacacatacacacacacacaccaatgttcctgctgtaagaaagaaatgaattactagtctcacgagcatttccactctcaggaacaaagaatcagtattcccagctgtgtctctgtctcaggacagaaggagattctgaaaacatgcacatacatgctcgcacgtgcgtgcacacacacacacacacacacacatgcacacacgagtgctcacactcacatgcacacatgtacacacgtgcacttgtatgtttgcgtccatttgcctgcacactcactctctgcttggtgccagggagccctatgcctctggctatcagcttctgctgctaggagtcacatcttacaaaggagcttcagcttcaattgtgcagctaatcaacacagtcttttgtttcccccaagaccctttgtcctccgaggcttcctttccttctcatcttctctacctccccagccgcacaagcctccacagcccccaatgccttcagcatcccagacctctctggtgtccctggggatgtctaggtaattacaatatcattttcttagaggtaggttgtgaccagggccattcttgtcctgcctgtgggcacacttccactcaagtggaaacctgtaggatccacaaagcctcttcctgtgtctcaagcagagagcggctggccatgtgtgcacagcaggggctctggtgcatggatgcattaaaggtctgcatacgtgtgtgttcatggtgcagcacatgtacctgcctcccctctccaggctgggattcagctctgcaatggctgccaaggagccaggggaaccagagccacagccatgtgggagttcaggagtaaaacagttctcccatgcttttctcctacctgaggttggggctcccaccctcagcccaaggctgagcaacccaagtgaggcctcgtgctgagacgtgcctgggtcttggtgttcccaggagggcactccacttttcctcatcctgtctgtggatgcttttatcagttcaacgagtggtggggatggagctaaggaagaggaattgttcaatgaggctgaaagtggttctcagaagaggatgctggctggggagcaggatttacacaacaggcaggaggcgccaaaagtacaatgtgagcactaggaagaaatcctggcatagctggggcttcccagggtgttctgtggcaatgcaggcagaaggtgaggccctgctttccagaccagtgacagagggcagcctgagcccaaccatcctaagaagcaggtgatgataaagatggctgcttcatgggatgatagctcgaccatggcagtggctgccgaaggtctgagccccagctttgcacctcttgtctctatggagggtggcagaagtaagggtgaacgtggtaaaatcaccatggtgctctttcttcataaaaacagcccttcccttgctccgtttccactcttagagagtggatgccttgaggcctggagtgtggagagaagagagagcacacacactcatcgacagacatgacacctctgagttcagagcaaagctgagagacagagacagagagagagagcagttcccagttaatgttcagtatgccagttccatgtgcctgcagacctttgccaaccccaggccacacaggtctcttttgtagtccattgcagagattggcatggttcccagggtcacaggagtcttaaaaaaagatgtctagtcagaaagaaaaggaaaggaactctcctagagcaaacgtgggggcagagaccagaagtcttgagtggagttttagttccctgatagctcacaggagccctagctccattagagcaaaccccagcagcccttggggattcctagcagcagcccttaggacaacggggctggactggggcagaataactaggtctccccttccctctctgcccagagctcctggctgatctgggcagccagaaacctggcagttgtggggctctttgaatcacagactaattcgcttgcccaacacaaagccagccatatctagccttggacggtgactgtacagaggcttccaggcctggggtctctgtggcctcccctaggccaggtctgagccaggaaagtgggtgagcagaggaatagtcatgaaggttactagatctcttttcttcattctcattgactcagtcctgcagagccttggaagaacattccagtttctggaaacctctctgaaagaagatgggagtacagctctcctgtacctctgagccctttagtggcggcttgtgtacagcacacacccctcctcgtcatctttcttctcagtggctgaatgcccggtcttgtagcagcctggtccctatctctcaaataggctctaccctctgtgtccctggaagaccccacagcatgggtaggacataccccttgtaggggagcaagggaggatatgaaggaggaagaaatttgggggaccctacaactctggaatcactaggccttctcctagaataagaggagacttggggggacctgggaccatgacactcctacactgaaggcttagtcttgagatgtgaggggtctgtgggatagggaagcccctggggaggactgtgggggtcagcagggccaggggctgtggtcgtgagggtctctggccccactctcacttgcatccccttgtctcctcgtttctccccctactcagcaaaggcagagagaagaccaagggaggcagagatggcgagcacaagtaggtgccccaggccggggaagtggccggacctcttcttccccctctgggttcttgggggtgatgctcccttcttttagtgtctttgtccttctcttcttcactggccatccctctggaccttaaggttccctgagagaatgcatatagctgacgagtggggaacacaagaagccaatgtccaccctcgagcctaggcagcactgtgcagttgaacatagagccttggagatccaaataagacaatctctgagcatgtggctgcatggtgtagccagccaaaccatgaagtacaaagagctgagcagagatgtccactctcttcaacccccacaatctccattcctcaaagggcacgctagggtatggaggcatagggttatctgatcagctggtcacaaggacccagcaagattggcttgaggtgatagtaggctccccaaagccacactgtcatctggagactcaagagtcacagaaattacagtaatttatgtcttcaggactgatcacactacaagggaactctgaactttgtgtatggtggcaagtgtcagttccagagaaaacaagaaatctaacttcctacccagagttcatgatgaacccaggaagttaaaactgtctaactggactcaaaaccaattaattcttcaaatgctaaaaacccagagacgtagtctatttttcgtctttagaaattaaactccagagatatgaagagatttgctaaaaactgtgggcccaatactttaaagaataatttacagttgtgtctgtagtagtctgagttgatcctgacaggtgtgtctgtatatgttaagatcctagggaacgtggaaccttgtccactgtgttgcccaaatcatactgagttttggtcatgcttgtaataattgcataagttataaccatgaccactgggcaacagaagcaatacgctgtgtgtggagagtaccacacggagagatagagcagtctgccagcttctgagaagaggagagtgtgtggcagggcagagagagtgaggggtggggtctgagtcccagcatgggtaagaggtggtaaggacattgatctgggggtctttcttagtgagaaggccaatgaccctgtgtttctctgtggccacttagatgtcaatggcttacccaggaagcacagcttctctccctcaggttctctctgaggttaccaggcctcagagcccatccagctcccagtctgtcaaactggcttgattcctgtgactgaagcgggggtagactggcctcacaatgcaggcccatggcaggtcccgaggatgtacgacctccctggccctacttcatcttgtttcttgctgtcccattaccaaatgagattaagtcagctaggatgtaatattattttaatgtctccgagaactgggaatggaatctctaagatgtgattaagcaaactgaaactcttcatcctgagaaaagaacactgtgagaagagtttgcagatcatggcaactgtgcggccaggatggttggtttatccttgggctgcagagagatcagaggaaatagatttgacctagaaaagaacaggtgttcccccatggggcgatgggaaatctattcccatgttagtgtttgttaaagctttgccaaagaattggcaaacaggaagaaaagaggagccagattcccaggtcaggaggaacacttgagggtctcacagtccctctggtacaagagggacacatggacaaacaggccaaatggaaatggtatggtccctctattaagggacagtctggaccagggatgtaactcagaagtaaagccttgcctagcatctgggaagtgccaggattggttctctagctctaaaaatataaattaggggctggtgagataactcaggggccaagagcactcgctgctcttcctgaggacccgggttcaattctcagcacccacatgcaactcacaaccattgcaactggagttccaggagatccagcaccctcagggagcacacacagccaaaacacaagtgcatctaaaataaagagaaattatttttaaaataataataagttagtaaatgcatacatacacacaccaaaaccaaaatttaagtcagcctgtcctttacccatgcagaaagctattcaaaacaaactggaattcaacacagtttcaaatacatttaaaattatacaattacctgtaaccttggggataggtaacatctatccatagacaagccctcaggagacagaagcaggaagatcaggagttcaaggcaagcctcagcttcatattgagttagaggccaacctggttgaattaagagcctgttttaacaggacaataaaaagaccaatgagatggctcaatgagtaagttttagtcacctgatggcctgagttgggtccctggaccccacatggtagaaagagaacgccagctcctcagtgttatccactgagtcccacgagtgcacacaaagaaggaggaaggccggagaaaagagaagaaggaaaaagaaataatgtacctggggcatggaaaataaaagagaggagcccatttgaggccactgaaatgtgtgctcagattagaaactctggccagtgtaaacagtgcacagaaaccacatagaccctgcctctcgtgcagagcgcatgtatcctgattagctgagggccgagccgtgagccttggcatttccaattgaaagtgtttgcagaggagaagccctggctggacactgagtgactccgtctagagttcatttggaaccacgccttctaagccacagcttccagaataattcatagagcaaaccaatgaagcagtcaggctgctgcgtttccctcagtgcatgccccaggtcataatgaatatgcagcatccacccttgagccctgtgggcattgcacagctatcgtgacagacttctgcagtgagccacgaacaaggcgagggaattgttgggtacataaaggaacattacagtgaacacagtgatttaaacgccttgtctctagagaactgtcagtctagttatatcattcggaccacaataatccagccactggaagtaaatgtgagtttctatctttacctcccgtacatgcctaatagtcgggttggttttgtttgtttgtatttttatgtgtgcatgttttttgttgttgatgctttgtttgtgtttcactacatttgtttgtttgtttggtgtgcgtgtgcacacatgccatggtattcatacggagatcagagggcaacctatgatcctcagttctctccttccactacgtgggtcccagggtttgaactcaggtcaccaggcttgcagcaagcccttttaccaccgtgccagctcagcagtcctttgttgctgttgttttttataaagcagttgtcagtcagctccaacagttacaggtgtgactatggcccaagtgccagggtcattgatagaatggagtgtcatttagaaagagtcccttggagaaaagtgctcactctcacatctctcaagcattctgagcctaggagtacagacacacttggctaaaggtttctcttcacagagctgacgactggcttgtttctgtgcctgcttctcattctatcctaccttctgtggtggtagaaccccattagaagagatgcagagttaaaagtcttagaataggaactaaaatcacaagttaattaaaaaaaaaatctgtctccaatataagtcaacaatctttaaagtgccctgattaaactaactttattttttaaattgtcgtttgccttttgccctttgccctttgccctttgccctttgccttgagtgcgctgctttccagggactagcagagtagaaagggccttctctatagtgagtctccgatgggtcaactgagaaatcacgaaggccagtggtagcaatggtatcctgctctgctacccccagggtagaaggtaccacaggcatggaacctggactaaggaccacagagacagacggtgtccgtcactggacatgtcagcactattcaccaaacacacaccattttgagacatctccaggcacatggtgctgcctgcaagtctgttggctacatggtcacatgacccagccttaggagaaaggttttctcctttgaatttctttcagggtacagtagaagtggttgggttaaaatatgatcattaaagatctcagtttttactccccaaaatgttcataccaatgaataaagtggcattttaattaaaggctcataactctccaagaatatcccaggggttgaacttaagtcactctatgggaccagctttagaaagccacaccatccttctgggcttctagtagcagcccagattccagccagctggcttctccaggcagggcctcttctgacccacatagcactcagatccgcagtctcacaacccttccacaagtgtggggaggttctggttggagcaggcagccatagctatgccattgaatacgtcacacatacacatgactaggactctaggaataaccaagagaaacttgtacagaggcaaacattgagagcctcgtgccatccataacacgggccatggaacagtgagcccaggcagaagagaatcccaatgctgtgacagggtgggcacagctgtggggagagtgtgagtgcccatgtgagcctgaggctgggactgttgcaggagtctgagtacagctggcactctgcgctttaagcccccaggatacttcaggcaaagccaggcaggacgaccgtttcctgcctccaaacaagccattccatgagctcagcagtctgctggatggtgtgtcgccaaccatgtaacactcaccagtctcttccaaatgtgctgaggtttgggtcatttttgaatgagggactctgtgtaaatgacatcccattctgcaaatggcactggcaattgagccgctgtcatagctgcaattcccctgctgccttttccccagtcttccttttggtcacaatgcaatcatgctcagggaggtcctgaccatggaggcaatgtggccaggacacaggaactcctgcaggcctacagacatgagcttcagccttcagcctcaattgctcctcttatgataggatgctaagaagactttctcctctctgagctttaattcttaactggctggataaagttatacctttaatcccagcattggaaggctgagactggaggatcaggagttcaaggccagcctaggctatacagcaagtttcaagtttcaagccagcctgggttatatgaaaccctgtctaaaaaaaaaaaaaaaaaaaaaaaaaaaaagtgcaagcatggctcaagaggtaaaggaacctaccagcaatgctgagaatttcagtcagctccatctctaggaccctcgtggtggaagagaagagccaatgtccaaaagttgtcctctgagccatggaacatgcatgtcctcgcactctctctaagtaaattaataagtaaataataaataaataaataaataaataaataaataaataaataaataaatgtaatttttaacatttaaatcctttaaacaaaatcaaaatctaaaaattaactgaagtcccacacaggttaggcctggatcacagaaaatacctttgagatgacatcagcctcatagccattttgttcttcgagtcaatagttaaaaccacagaaatggcatttgcagttgaggggcttggggctatagcccactgggtaatgcttgtcatgcatacatagtaacccatctgtaatcccaggactccagaagaggagacagggagtcccctgagcaagctaaataagattacccattgagaaactagacaacaacaaagacgacgcttgagccaaataataataactccaaagacatcagctttcctctacagagtccctttcttccttttcttcctttttaaacccataatacaagggaaagcagacaaatcagggtcgccagcctctttaacctgtgtctgggataacaatgaacatatctgtgagttgacacaacatgacaggagcagtccctgtcccatccagcacaggatacagacgtggctcactccatatctgggtttaagatacaaccaggtttggggaatgacactgatcccccaaccccaagtagaggggccatcacaaggacagaaaggttttcaccaacctcgtgctgtacagcttgccgagcaaggatctggatggctttgatgccatgcccaagtctctgcaaagagaggctgacccacgtctagaggcaggtgaggatgggcctgtacccacccccacaggagcctgcagtatggcagccacacccaggaggaggagaatgggaagcgagggagtcagatgtccctcttatacaatatgaatggggtaatggaatactgtacttccccccacggatcctactcttggtctttcctggctctggggacctcaggctcggctgcagggacatctctgaagggctgtgaggacccctacccacttccctcagccccactgactgcaagaccctttgcctgagcacacggccacaccacaccagaggaagaggtaggggctaggtaagagatggtggtctgccataggaaggcataggcagaggggcaaccaggataagagaaagacccttttccctggggactcgggagactctcctggcacagagaagagagtaagacagggcaggctctacataccaaagccacctgggaccttaatagctgtcatccatggctcccacctcagcctcagtctgtccctctgcatccccccggacctatgtacctgttctgatagttgttctgggcatctggccgcttttcctgttcgctctagtgggggtgcatggacaggaagaaagctgagggaccttgcagctctcagagctctgagaaaacagggcttgggtgagaaactcaagacccagtcccaccacaggccacttccctggtgagctgggactcccacctgctcttcattaacttgaagctggtgcctgggaagaagtgtcctatgtcctttggggcacacagcccctaatttgtattgtatcttgggaaaagtgaacgagggcaaggacccccatctcctttttctctgagtccctcggggactgcctcttgtgtgtttgtgctttcctgcgtttatctattcccgccccacccccctcactctggggggtctcccttttacagagcgggaaggagtgtgttctcggccatgaaactcggcaaaactcggtcccacaaagaggagccccaaagacaaggtagggaacgtggtcctgcccaccattcacacagctgctgcagccacttctttgaactgtcacaatcgtttaagcccgccctagactgagcacaaataatcttctttccccattggacacttgcacagccactcgggcagggtttggactcccgttggctagtctgcaggttaggagagggaggcataggacattgagcctctgccaggtggatggatgggctccttctccctacattcagtatttaacttcacatgaacccagggatttaaaaaaaaaaaattaaagctagtagcaagaatgcagcatgctgtgctgtgcctggctgcagcagcagacctacctcagagaatggccactgggcctggcaactggaatcactgctaagagaggaggctggaagggcacctgacagccgttgttaaggggaggcaagaaggataggtgaaagataaggggatgtgtggggtgtagtggggagatatgtgcacccagcatcggggcacgcctacgtggcttattggccctagaactttctcttccctagacagttttggctgcactcttcctagatggagggtacagcttcctgctgaaacccaaacctatcatatctgcatggcttttccaaatcatgctctcaccccactggatccatacacaggggtgcaggcctgagctctgcattccactgcggacatcatcacgaataaattacttcttacacctcgggggtaaaaagtatctgaatgcaataatgcccacgttgatgggtcctagctacaagagtgagtgagtgtgtgtgtgtgtgtgtgtgtgtgtgtgtgtgtgtgtgtgtgtgtgtgtggtatttgtgacctgcatcagtagccactccatttaaaagcagccactgtgatgagctgtgtgtaataagctcaggatgttttctactttcttccacaaaggctattcagagcttagagaacacagttaagtaaaagaattacattcggctaagactacagaagaaaataaggctagacataatggcaattaaaatgttttaaggactaagttagaccctggcatggccatgcgcatctttaattccaagacttgggaggcagaggcatctggatctctgtgagtttgaagctagcctggtctacatagagagatccaagccagcctagctacatagtgagaccctgtcatggttaggagagcatgacatgtattctaagcaagtgccatccaataagccagaaatgtaactctcctgactagaagacagtccccagcccttcctccacccacctgctcttctctccttccccagatgagccagcagtgctggagatggaggacctggaccacctagccattcagctgggggatgggctggatcctgactccgtgtctctagcctcggtcaccgctctcaccagcaatgtctccaacaaacggtgagtgagccagaggcctatatcccgcctgacaccgccctcctggcctgaatcccacctatcactgccctcctgagcaggacccacctgccactaccctcctggcctacatcccacctgccaccaccctcctgagtgggactcgcctgccaggcttgaaatttgggggcagataaatcagggcctatgggtagcttctttctttctgtccttgcgtgtcctctgagctgtctccctgtagaggtaggggtggatcaggcccttgagcttctgtgggtgaagggacatcacagagctgaccagtccacatgtgactctgttcacccaatggccataatcctgttgcttttgtctttgcttagtcttctctgttggtgccactgaagacatctaccccctcacccccgtgcacccccagttctgttggcagaactgagtatatgaaagtcacaattttgtccctctggcctttccatctctcacaccaacctgacagtacattctcctcctcaggtctaagccagatattaagatggagcccagtgctggaaggcccatggattaccaggtaggtgggcccaggaatgtctgagccttacagattctgctggagtgtggtgtcccagccaggtgtgtatgagagagtcggaggtaagagccagggcatcctagagtcacatctgaggatagagtctcaaagaaggcatctgtctgggaggcatttcccagaagcattaaggcaggcaattcaaaccaaaagaagaatgtgaggtctctgtttgcacagctcagagctccttgaagattctgcatccattgttgaaaatcctaaggaaaggggatctagaaaaacaatacacacacccacatgcacacacgatttttgaagaatgtttggtgtgttttaagttgttaaaactggaagtaacatcaatccggtttttcttctttgtgtgtctctatatcttcttagattagtagttctttgtttctgaaactaaattttaaaaggctctgaccaggggggtagccatactaccggcaggacaagggctcggcatccctggtggctactgacagagacttcgatggcctctgctttgcaggtccagaccctcggtcttggcttttctctcagcctgaaatcagagctatggtgaagggctcacaataaacaggtgtccaagcaggaaaagccttgtccctatgtacaaagtaagaagaaaggcgagagaaggcatctctcaagacaggcccaggcagccaccatggctctagactcccctaacagtaaacatgacccagttagatatcaaaaactgttgtgagtatagccttattctctatgcccatttgccaggtcccatgcacactacccttatgcgtgaacaactgcaccgcacctccctcaggagatgatataaaggtctagagaacccccactgaaagacaggcctggccacgtttcctgaggcttcaccttgactcccttcatgcttgctttggtttggttccctccagtaacctttttctgtgatatttaaaaactagccccaagtcatgtcacatgatgccaccctgtgactctagacaacctcaagcctttgagtcctgtggaggttggggaatgttgccccctgccctatcaaaacccaaacacaatgtcctgaagcattaggagacgtttccaggaggctgaaacctgggtgtgggatgcttcagtgtgctgagaccagggaaatcccagagaccccactcagatcccgtgccactggcctgctgtgcaaaagcacacaaaactgttgctaatgaaatttatttcttaaaggcttattataaagcaggcactgtactaggagctgaatatgtttccattgagattatgtcatccttacaaccatccaactgtagtggttactccacttttacagtaagacataaaccaagagttacatggccaccaaccacaggtaaatgaagcctggaggtggagttcagagccacagcaggcagagctgcctgttctctgcaatggttgctcccttgcttgcttagctcagtacttacatcttcctcccaaactgcttcctgacagggacttttgtgtcccagctcagatatgtctacctctaaagacttttaaaccttctgacttgcaccaggtagcccatctcacctggcagcgctgtgtctcctgacaggtccagccacagctcacccatgcgcatttatccaccgtgcaggagggagcagagaggattcaaatacacagtagttccacttccaataaatacggtgtacaaatccataaaaccaactgcttttctctcctttgaggaacttggcttcaattagtcagaaagacctcaaaaagtgtgcggcaatgaagaagggtgaagagaagctagcagaacccaggtccaggtgggattctgagagccaagccaattgtgaaggagtgggaagagaccccacacgtgtgcagcatgctggggacagttagaacaggtggaacattattcttctttcctggttattgacatcttcaagggaacacgccgctgtcacctgcctggggacgtgtgcctcccccagctctccttggagcacactcaggaacctggaatctgtctcttgatctctcttcctgagactaagtcttaacatcacctccaaacagacctccagtttccagcatcactgggtctcccaggccagacccaagccccacccccacctctgcagtgttcctgcattctctccccttggtctccttgtcttcatattgccccatccactctaccctccctgtcaccaccagagtgatctgcctatctggtcatgtcatacttctggccctggaggcaaggggagatgaagacctctgtagaactgcagttccataggtgtgagtgggcctccctgtcccttcgtccttctagcttcccctgacgttctgatgcacgcatgaaaagaggttccccaaagcaggtcacagggcaccattatttgtggggtccttcaggacatttgagtagttccccccaccccagccttgttccttgctttggaaaagactcttgggaattctagcccttgcctcagcaggagggatggtgagttagccagaggggccgcctggtcccaaggtcctacctgtggctccctttgctctctgggtttccatcctggaaacacggtgcatgagatggaagtttctttgcaaaatttcctgaaatttttaattgactttgtaaattgttttctcaacattttgatgactggatggcccatcccctcctgccaaaaatagaagatgagtgcattctaacgtttaattacaagtgtcacacacatacacccctgaagtagcagctggggaagccatggaagtttgcctcccttctaccccagtaccacgctcctcacctctatctcacacttccaggcttcccctgggaccactgtcatctagcaaagcgcatcccctccgatgtttgttctcccatctcttcattccttcccgccctccctctcctcctcagtacacctcccacggctactgtgagctcctggctgggtcactgcagccagctatgctccgttgcagaagatgagaagatgaaccctgaacagaggagggggcaaaagatggaatgtgtaatgcacacataaaaaccaaccaccttcttggcatggggaatttactctcagctggcacatctggccaaaacagaggagggggcaaaagatggaatgtgtaatgcacacataaaaaccaaccaccttcttggcatggggaatttactctcagctggcacatctggccaaaaccacacgtgtctgtttcccaggcctgagttatagcaaacctcttccttttgagggggggtgggtgggtgggtgggtgttaaatgaatttttaaaccatttgcataaaaaggtttatggatctggagatatagctcagtggtaagagcacggactgcttgctcttccagaagacccaggttcaattcctagcacttacatggcagctcacaactgtctgtaacccatttctcagtgatctgacaccctcacacgacacacatgcaggcaaaacaccgatgcacataaaataaaaataaaattgttaaattgttaataatttgttaaattgttaaatttgattgttaaattaatttaaattgtttaaaaaggtttctggaagttagaactctatgcactactgtgcaaagaatattccagaaggactcctagtgtctcttcacagtaaacttctcggcgctaagttaattagccctgtttcctttttggctccctgaagaaatggtgactattgagactctttcaagcgtggattctaagcattccccggcccccttggcctctcacatcccagaatagaagcggctgcacacagagttcaagtgttcttctgctcacggccccttctgtgtttctgtgccttcttggcagtggtcttattggtgttaaggtttctatttttcctagcatcgtttctgatgcgtggatttttcttggtcttcaagctatttataagaccttgaggaacacagtagatggtaattttagtaaggattctttctatctaaaaggagaaaataattctcctgagtaaaatcatatttagaagttgcactgaagcataacaactgaagtgccagagacccagatgagtggcaccaccagctgcccttacagcccagttagctagcaggaagtgctgacagagccaggaggctttgggtggaaaatgcaagttcaagcatcctgtggagcaacctgaagcatccaccaaccttgcctcctcaagagatggtccctaggcggggtagcttctgtctaagaggccacctatgcgctgtctctcatttcatggagttttcacctgtgatgtgctttcggacctgcaccatctcgcttaaccctcactggacagagactcagcttggagctgggggtgtgcagctcactgaacccacgggatcctccacatccattcctgcacatctgtcaggctgaggctcagttccaagaccagcaacccaaatctgtacctgcctgtattttgccatggccaccctaatggggattaaaccctcccccaaatccaaggcaggagctaaaggcttgaaatggagactcaggaagaataacagttgtctcaaaattcacactccttcctccccttcccccttctccccttcctctcccccctctcctcctccctttcctgtctgtctgtctgtctgtctgtctgtctgtctctcattctcattcttatattttcagttttatatatacatataaatacattttacatatatgtgtctttatatacatccttttgttacacatatctttatatgtatgtgcatataaagatataatgtatcgcttgtgtatattataagctaaaatatgtatatactaattttaaacctataagccagtaatcatttatcataagatctttgaggagcagagggtttattctgacatctcctgtgcctgtccacagcaggtgtccctaaatatttattgataagctagacagctgaaacagggcttcccagggtagaagctaaaggctgcagaatgtcacagtagaactcacacaacattctctatgcaggccagaaggttagactctggcaactcaaagaaattcaacagagggagaggggactggaacatgggaaagcgcccagcttccagaaagccaaggacatcttagaggttagcagcgtaaacaagaaaccctggacaggacccaaagcacgttcagggagatgggagcagcttggcttgtttaagagggtagggaacgggtgaggcaggcttcatggtcccttagcagagccatggcactgaggagaacttggaacccaagaatcaaccagaatttttaggggtacgttgtcatcttgtaagttcatgaagaatcactcaatcaagtttcaaaaagaaatcataactttttaggaatagtttactactggcattacagcatccatggctgaacgcgctgcctgtggtaggctgggcatgcctgaccagccggtttaggaaaactgttgctggacctgtctttggcaactctggcaactcagatcaggggtctggcctgagcaccaggatctggtaatgtttctcccttgggtgatttggtaacactggcctaggggtcaccagcctctcacttttcttggtgcagatatcccaggatcacctaggatatcagaggccgtagtcaacatggagcctggggtctcactccaagctggactgggtcctgcagttcctagccctgctgcctgctgccatgttccaggaagactagactctaggatggctgcattactcggtgtatcccttctctccctcctgcaggtcagcatcacagtgattgaggctcggcagctggtgggcttgaacatggaccctgtggtgtgtgtggaggtgggtgatgacaagaaatacacgtcaatgaaggagtccacaaactgcccttactacaacgaggtcagtgcccccatgacttaaggtgggaaaggggcgtcctgacaggggaacaggagcaactaggagttgagacaacagagccaccagccccaaggtcttgacccaacctcttacatcccagcacactgcataccacaacctctgcacctcctcatggaccccagtctggccctgctgtagctacaagtcaaccatgaactgctagcaatgcccgtgaacccctcgtagcagtcactgttgctgtccgggtctgaacctgagggtagcacagctcacaccagtccagcccaggtgccactggtaccatgagtgagtccttccaggtactgaatctctcctacacctatagatacatcaatacccatcatagggatactcttgcccattccacttgcagggacactgagactccagggccttgctgctcatgttgtgggtatcttccctttctactatgctcccttcttggtctcctgagcccctaaaaggcttctctccagaacacaaccttgacttcggctgtgagaaagaaaatggctgctgctacctccacttgagactccctgggggtgaagggtgaggggtgagggacctcagagacttaatagtttgatctccccattttacagaggagataactgaggcttcaggtcagaaagagccttcctactgtccccagggagctgtggatgggataaagcccatattgactgctgggctccagatggaatcccatcatgattggcccttccctgatacctgagcacattccaactatctaaaagcctgggtgtcctgggcttcctgtcctagagggagtacccagtctatctacctcagtgacttcagttagcaaggaggaccaagctagctctagccatgcatccatgtcctgtgccctgcagtgtagaaagagctgaggatgcccttgggcagctgtgcaccgacaggacccaggaacactcctgtctaagcttgaacaaacttgaacaaactcctgtacaaccacagcttactgtgtgtcccactggccccggggacagaacagtactgctcaagggccctccggccctgagtggaatcaggatatccaacctagatatctctgattttatatcaggacacattcctgactggaaaacctctgttttagacaagggtccactttcctctgataacaacaaatcccagtggctctctgtggttatttcataatggtgaagtcacacttggctgacttgggaggtggtggtcagcttgcttcagatctctgtacttcatgtttcagtcaacttgcttttatgccttccaatgtagcttcccagctctgggctcccctagcaaactcctattctctctgcagggacccatctcaaatgactttgccattgagtaccctgccctgccctctctgagtcagaggtcagcatcctctctgtaggcaaaggttaagaaacccgagtttagagaaaagagacaggaacagaatcagggctacttggctttatgcaaaggagcacccccgttaccaggatgagctggaagttggtcagagatgatccgaggggaggggatggttttcagctgtgctcttcaactgcggttggttttctgtgtttctatccctgggtggataaggggctgcaggtctcccctaccactctctcagctcaaaatgccaatagcaagcctcctccctgtagcaactaaatattcgcagatgttggcaaatgtctcataaggattaaactcacccccagttaggcctactccactgccctgcattgctctcattctttgcagccccaagaattctaattcttttccttttcagtgaaaaacattgtcatagttagggtctttgttgctgtgaagggacaccatgacccaacaactcttataaaagagaacatttaattgcgggggagggcttgtttacaggttcagaagtttagtctattatcatcatggcaggagcatagtactggaaaagtagctgagagttctaaatctggattcactagcagcaggaaaagagagaaacattgggcctggcttgatcatttgaaacttcacaccccacccacggtgacacacttcctctgaggccacacctactcctaattctttcaaataatgccactccctatgagcctatgggggtcattttctttcaaaccaccacaaacatgcccccagccatgaataggtatggctcttggaaagttctctaggaagtagaaatctccctctggctgcgctagaacagcagaggctggtgggaaccatcaactgacttaacaaatctctaagcagttctgggaaagaatcatgctcaggaaatacaaggactgtgagtccagccagctcagagcacaaggggtcctggcccgggttagccagctcctcccatgggtctgggccagttcccacacctggcctgggagctcatcaacacaactttaagcttcctgggaacagggggcttttgacatttgtccttccataatgacctggccccacatggaccaacacaaagccccttctctatccacatgtgtggtctagctggtcactgggtgaccactcctcctcctgtcacctttgccatggtcccttcatcccaaaggatctagccatgtgctatgaccatcattctgcctttgccttttttctggctctttccttctcccttgcccatgtggcgctttactgcagactatcctaagcacaatcaggacaccccatggacacccaaggacaggccgggtctgtcagccatcacctaagcatggctttcctccgcttccaggtggatctccagagatctcacatcctggtgtgaaccgtccccatcctctcagtctctgtcacatccctgtcacatccttcatctcattgcccctccttcccaggagtccccatgacactctcccagttcacggtctctccagaagcttttcccaagcttcctaacttgccatgactttcttgacccaccaagaaagtctgctgcttcctagagccctgtctagagcagtcttctcctctggtactcttctcagtgtctcctccatcccgcagcttctgccaccatcctcgtgctggtgcttcacttccagatctaggaccccagagctgcagaccctcacctcagccaacacccctgagacttaccagccatgtacagtgaacatttactgtactcttatcaactgcacaactgagtcctgtcattttgattttatacccatgcctccctggttttgtgtggtcatgctcctggagtaggagggcatggtggcctaatgtcactatccccataacacaagggtaaattgaaaggaagcgatgacccagcagttaacagctagatgccactggctttataggcagcacatcagcccacagggcttaagtgttagctataaaataaaggcatgggggttagagaggtagctcagaggttaagagtattggctgctcttccagaggtcctgagttcaattcccagcaaccacatggtagctcccaaccttctataatgatatctggtgcccttttctggcatgcagacagaaaacagtatacataatctagatagatagatagatagatagatagatagatagatagatagataaccatatcacagatttaaacaggtttttgacagtgactattgactactcggggtatttactctaaccgaagccctgtggtagcattagactcttcccttgcccacaagttcatcaaagcagcagtaactgtgctcactgcccacaccctttccccatcctggtgcatctaggacaaggatggggaccatgagtgagcatgggatctcacagcagatgagaacaatgcacagagccgcacttctcttttgttaccaaggaagtgctgtctctccctgagtgcgtcctcctgagacccgctgagttttatctttgaacacttcctgggttggggtgtatttcccaggtagcacttggtttgctggttatctgtatgccctttcacaccgtggtgtgcctcacagtccatagcctgcttgatcctgtaacatgatgctcgatgtccacacccctatgttacagttctctgggggttatgccaaagaacacatgtataagtctatactacaaaaaggacagaacttgcagagggctcagatttgctggctccttggtcggggttcttctacacacagcctataaacaagtactcggcttttgacattgtagcacaacatcatctacaaatatggtgggcttcctgcaaaatgaacacaagtagtaagaagacggttccatcccctggtaggagacggggccctactcttcacccattccgtctctcagaactcagtagctcaccactactgcccacatgagctttgagcctcatgggaaatgagggacacaggcaggcactgctcggagggaggggccgccagccacagcactctgctctctctcccccccagtactttgtcttcgacttccatgtctctcctgatgtcatgtttgacaagatcatcaagatctcggtgagtggagggctgctgaagctagtgggcaggaccacactgactaacgcaggacctcagcacggccctgtaatgtgctgttcataacacagcagccctatgcctggatgcatggctggccaaaggggaacagagaatggatattgaccccctcttgccccttcagctggattcctctgtaaagtgtaaaacctactcatatatgtaacggcattggggggaggggagcatggcgttgggcaggagaggctgatgctgagctttcagcaaaccagccctgttccctgccaaataccttcccactttactaagaaagatggaggtaacactatctatcatcagtgggccctgcccctgcccctgccccttcacaccccatccccaaaggctactccctgcagagcctgactggctgcttgtgattctgctctggaaggttatccattctaagaacctgcttcggagcggcaccctggtgggttccttcaaaatggatgtggggactgtgtattcccagcctggtgagtaacccctcaagaactggctcgtgcatgcagctccagaacatgcttgctatttggctcctggcatccatcaaggagcacagacacagcccactgtccatgagtagggcagccacgggagtggcagtgaaaccgtgtgcactctacacacagatgtaggagtcgtgtgcgccatgtctgataggtgtttgctcattatgggggaagggacctgggaataacagtacagagaggtagctcaaatacacgtggtacaggagaacatcacctcccctgtgtcctatgagagcagttatacagagggcagtgagagccctggaggggccgtgcccacccactgcctctggctggcacctgctgagcagaaaagaccctgctgtccttacaaaatccccatcaccccctggcagttaagaggcctgagactcacagatgtgccagggtttggcccagccaatcagctagtcagggggataccagggcatgtggtatccaacaagtgaaccacccaatctaagcgtggtaacaaccaatggcaagtgtaatgcacaactttggggcactctgggctctaaaatcgcttttcacaagggaccccagttaccctaggagcagctatggcaagaaaggctgtgtctgattataattccacaggtacctatggccagcgctgtatagagttggtatgggcaccccaagagttggtatgggtaccccaagtgatggtctagagcaacagttcttaatctgttggtcgggacccctttggggttgaatgaccctttcacagaggtcacctaagaccgtcagaaaacacagacattatgattcgcaacagtagcaaaattacaattataaagtaacactggaaataattttatggctgggggtcactacaacatggggagccatgtgaagggtcacagcatcaggaaggctaagaaccactggtctagagggcttgtcactaagtggccaacttggggatatccatgtccctgaagtgaaactactcagaaatcaataattaccctacaaggccctttgttggtgacaatacaatctcaatccaaattgtcacatttgacataaatcaattaaataaataaatcataaatcaattaaagacacagtaacatcccttcagctttacagaggagccaatgagcagagagaaatggggaggggcttggaggagccactcagaagtaggtgaaacagttggcattttcttgtggccctaataacactcagctggtgcccactgtaacagtgacttgtatcaggagatgtgagtctaagacatgaactcatgggtcaaaccattccagatgtgtgagacctcaaaacacctgtaggctatctgtccagatagagagctggactgggggtgtatctcagtggggtacttgcctggcatagccaaagtgctgagttaaatcctctgccctctataatccaggtgtggtggcacacaactataatcctagcccttgggaggtagaagctggagaatcagaagttcagggccattcttagctatatagtaagtactgtaactatgattcatgaaaagaaagaacaagccgggcgtggtggcgcacgcctttaatcccagcactcgggaggcagaggcaggcagatttctgagttcgaggccagcctggtctacagagtgagttccaggacagccagggctatacagagaaacactgtctcgaaaaaccaaaaaaaaaaaaaaaaaaaaaaaaaaaaaaaaaaaaaacaagaaaagaaagaacgatggataggcccaaggtgataaggagatttaccttaaagtaagagggagagcctgttctgatacccaggccttcccacagccccgtacaggatgggagcctcctgggaagcaatgagctacactttgctacattgcttcgcaggagacaagcccagccgtgcccataggcttgagtgctgccagggtctctggagatggtctcctcgctaggccaagcatcagcagaccttcagccaagatagagtgggaacttagtatgtgcccacagtgattgagttctgattgagaaactgctgctgagggcagtggtggagtgccccctaaatcccagcactcaggagacagaggaaggaggatctctgagttcgaggccagtctggtctacacggaaaacgcagctgttatggaggaggtgggttcagacactggacatgttccagtaggtctaacttctcaatccatgtagacgtggttgttcctgtctgacagtaaggaaatcgagactctccaagtccaaaactactgtggagtaactgtcagacagaagttgagctcaggcctttgtgggcctctgcactagggtaacccactcccagacttactgctcctcccggtaaccttccagaggcatggccaaccttggcttgattgcaagtgcaggaaattgcttgctgctgccctctgctggagatgagttgtagttgccgtggccagagctaccctttccttggtcgcggctctccagttgttcttgcttctccagctggagattgcagcctccagacttgaggcctcagagactatgaacccggtgtgcatcccacacaaatgcccctcagctgcatccctgaccctcagccaaccagaagtgggacactcacacccaactctatttcatgtatgtcagacccaaatctgccgcctgtattttttgccacctataatcttcagccatgttttttcaggtttatcttccaatagcttttgggtttaaaggtaaattctgttttgccagaattgtgatctttccttgccaaattcactcagtttcacccaaccatgtgcatgccttttccatctacccactcatacaaacatccactcctttgtccacaacataacagaccctgctataaattagtccacccaccatctatttacccatacattcccaaggccagcgggcagccacactcagcccttgtctgtctcgccagctccttcctatttatatctgctcagagccatgaggtccaggaaactatggcaccctcctcctgaggccaccagctcatcagaggggccccagtgactccaaacactaaggtttcctggcccctcagcacccttgactctcagttgacactgctatggccatgaccgtcgtgacagctgggccagccgacccacacacacacaggctgtattctgctcccttccccaacctcaactcgagggtgccactgggctcagaaccttggaagacacaggtgggaagggaggggagcggggtgagttctgagcccctgcagatttcaattcctgcaggaaactgttaagcaggtctccccacctcgtaccttatcactaactttaaaatcaacccagtggggacaaatcttcctaaaatgcctcctttgctgacacttgtacctttctctacactgtcctgtggcctggggacaccagaaggcacactgctaatctctgcaccagtctcaacatggagacaggcattgcgtaggtgatttctgtggtggggggcatgcacacgggaccctgtgagcactgagaggtcagggcctattcctctgaaggggtcaggggacgctgcatggaagaggagactcttggataaaatgatccgttttccagctaactaaggaggaggaagaaggcgaggacattcggagcagacacaatgacctagagtttggctctgtgtaagctcaggaagcaatgggtactttgcctggacagtcctggggtggtgggaccaagcagggaagagagtagcattgccacatgtttggcttcacctcaagacacggagagactcagaagggctgaaaggaagaacatgataggtaaagcctctattatagtaggccctatctagcagctatgggggccagctgtagcagggaccacagcagagactgcaagctgtgaaactgacttggaagcaattcggagtcctgacacttgctcctgggcagggtctcgctcagccctctgcctgcagaggccctctgtcttcactggctgaatgcaaccagagccatggccttgagtctcctgagcctgcagccttgagcttgcaagccctagcaagcactgagcttggacgccctgtggaatcctgggatagatggtaaatgcaatgcccttccacctctgcagaacaccagttccatcacaaatgggccatcctgtcagaccccgatgacatctctgctgggttgaagggttatgtaaagtgtgatgtcgctgtggtgggcaagggagacaacatcaagacaccccacaaggccaacgagacggatgaggacgacattgaagggtgaggctccatctcccctagagacctgaacacaaagttcccccaaaggaagcttgtagagtggtctgaacccagaattcttaccattagcccccttacttccacacttcaccctgccagtctctcctctggggcccaaggcaatgtggtcaccggggttaatggaaggtagtgctttgacatctagacttccggctgagaaagctggtgggaagaagagatgctggcgactagaagtcctcctgctgccagggtccatgccatgcactcagatgagatgtcactcagggcgccaatcttgggccacagatagtggctgctgagaaacactctgggacattgtctggactctcagaacgtgcctgggcctggtcttccatgggctgggagaggagacagctcctggaagttcttgtctcagggaagacacagagctgtgaaagctgatgccacacttagcatcccgcattacagtttacaaagctctgtagcctatgtactgccttcctgagatgtggctgttagcatcaccgccaccttaacgaggaagaaactggggcttctccttctgttggaaagtgtttctcagaattctaaaaatggataggtgcatgaattagtatctttaatcatagtctgggtcctctcatgctgtccttcacagattatgctaagccccaggcagctgctaagatggtgtgtgtgtgtgtgtgtgtgtgtgtgtgagagagagagagagagagagagagagacagagacagagacagagacagagacagagacagagagacagacagagcacatatgcaagcattcacttgctttgtctcatctcctccctgtccaccatccgctctgcctctcctcccatcataatccttgcatagctcttgttctaaggacctaagaggcaaagagggttctctaagcctgtcagtggagatgacatgctgcctgtgctcataggaacttgctgctccccgagggcgtgccccccgaacggcagtgggcacggttctatgtgaaaatttaccgagcagagggactgccccggatgaacacaagcctcatggccaacgtgaagaaggcgttcatcggtgagaacaaggacctcgtcgacccctatgtgcaagtcttctttgctggacaaaaggtactggggatggaggtgctgaaggccgggatggtgggctcggagtaaaggtgagggatgggaggaaggggcagaccaggaggagtctgaaacccccagctggaaaacacatgcacatatacatgcacacatgcaggcacactcgcgctcacacacacacacacactggcacacataatatggcttttttcccaccagggcaaaacatcagtgcagaagagcagctatgagccgctatggaatgagcaggtcgtcttcacagacttgttccccccactctgcaaacgcatgaaggtgcagatccgggactctgacaaggtcaatgatgtggccatcggcacccacttcatcgacctgcgcaagatttccaacgatggagacaaaggtcagcagcatagcatagctgtatccagaggagaatggggcatgatgggaacatgactgaggcccctttccctcacaccacctccgaccccagccagacagggtttttaagggtttcatttgtagcccctgcctcaagaaaacagggacgtaataattcaaaactcctgggagctgcctggatttagcgattacctctgctgcttttgcacctgtttccccattgaccaactgaaaatgagagttttcatacagggaggtgcacgtgctctgtgtatgtgatctccatgtctttactggtaactgatgagaacagtgacacctgtctacaggcctgtggaactgactgtaacccagaatccaggaacacagggagacaaaatgccattcccgtgccccctaatacgtccagacagatagacatgataccaagtgaccagaacagcaggcggaagaaataaagcctacagtacagttccatatataggaaatacccagaagaagtgactccagacagaaaataggcttgtgcatccaggaacaaagacagggtggtcagaagcacctgctgaggggagtggggcttctttagggtggccacaagtatgacagggtatgacaatgggcgcacaacatactgaacatgcatacgatagccactcaaatgtgcactttaaatgacaagttctatatatgaactgtggctcatctgtttaatgctttgtttacaaaactaacaaataattaaatacagaagctagggaaatgggtcatgaggatctgagcttaaataccagagcctatgtttacgtgtgtgtatgtgtgtgtgtctgtctgtctgtctgtctgtctgtctgtgtatcaaggagtgatggcacttgtaagcccagcattagggaggcagaaacaggatctctggggttccttaaatcccagccagcctggccagcttgccaagctctaggccaatgagaaactctgactcaaaaaaaaaaccaaaaaccaaaaacaaaaaacaaaaatctgagattggccctcctatgcacacagggctcccatacatacacatcataaatacacacacacatataataaatggttttgtttgttcgttcatgttttgccatatagaccaagctggccttgaactcacagagatctgcctgctagaattaaacctgtgtgtccatatccagaatccgacaaaaataattgtttaaaagaaaatacacaaagaagagttagattcgcataaggcaagatttgttggctgaggcccaaccaaacctcagcatgagagaagagacttgtcaaagacagagagcaaggctcctctccagccctggggcctgttcagcccaccatattcacagcccagggtgcttctgcctcaaggagctgaggacccacaaataaccaagggaacacagcgaggagggaaggtcccctgagcaggagaggcatggagatggacatcctacattccgaagcagaacaaaacaggagaatccacgttgaggtgttcaggaagaactggcagggggaagcaggaccctggctttccctcctacacagggcctaggaagaagccagaaggcactctgtgtaggcacaagtgagaaaggcacccagcagacaaatatccttgagctcagcacccagaagccacaaagacccctgcatcctaggtgagcctgggatgtgacggcctttctacctctctcctcactgcttcaggcttcctgcctaccctcggtccagcctgggtgaacatgtacggctccacgcgcaactacacactgctggacgagcaccaggacttgaatgaaggcctgggggagggtgtgtccttccgggcccgcctcatgttgggactagctgtggagatcctggacacctccaacccagagctcaccagctccacggaggtgcaggtggagcaggccacgcctgtctcggaggtgaggacaaggctgtgtgtccagatccttcactccatcctcccctcaccatgcagctgagttctggttttcccccatcgctaccctgtccactcagagaccctcatttgacccctttgcaagacctcagtcctcacctactgtcgacctatgccctaccagagatcctgttttagctgccaccgaccaatggcaccccacctctgtctcgcttctcagccacagctgtccttgtatctgcagaactagccatcctctcaggaacaactagggtttgagtccagactgcctagcctcaaagctgggtaggacacaccccacctgtcagccaagagcctatctgtgacattaggaacctgacccaggcctgtggctcacaaaagctcagcactgggcttaactcccccacagagctgcacagggagaatggaagaattttttctatttggagccttcttggaagcctcaatgattgaccggaaaaatggggacaagccaattacctttgaggtgaccataggtgagtgctgagaccatagggaaggtttcattcaggcttctggttgtcagtggtgtcactgtgccccaggcttcagagagcgggctacattgatgtgtttcccacgactgtccacagacatccacgaagcagccctggttcttgggagtatacttgactgtaagagaggtcaatcagcaatgtgccaaagggtcagactgggactagaacgtcagaagaaaatagggggagctcccctgccatgccctgtggtggaagagagaggagaaatccagactatgccctgggctgggcacagccatcatcagagccctcccttagggatgacatggaatctttccctgggtggtgttatctgagcctagttctctgactttacttctccaagagaaatacatggagggtggtggagtgagtgaggaaaagactgcaggcctcttacaagttgctctttgtccaggaaactacggcaatgaagtcgatggtatgtcccggcccctgaggcctcggccccggaaagagcctggggatgaagaagaggtagacctgattcagaactccagtgacgatgaaggtgacgaagccggggacctggcctcggtgtcctccaccccacctatgcggccccagatcacggacaggtgggcatcacttgcccatcctcaagtggccttggcccttacctcccagatccctagacctcaacctctctctgcatcctgcccgccccaggaactatttccacctgccctacctggagcgcaagccctgcatctatatcaagagctggtggcctgaccagaggcggcgcctctacaatgccaacatcatggatcacattgctgacaagctggtcagcaaggctgcgggtgacaggatctgggagagggggtgcatgtacaacacaggctgtctctccagaggcttgtcttgaaatacagaaaggggaaacccacagggtcccagagctctaagggtctaccccctctaggtctgggctctcagaagcagcggggcaggccagctacttcaggtctgcacaagacctctctccagtcctcggtcctgctctgtccaccatggacatagctcagagtgcttcttcctgaagaagctgaggacccatgaataaccaagagtccccgtgtctacaactggggagttggtggctccttcataatttatatagaatggtccatattactaggttcctctttcctgaggtgaatgggaaagatctgggagaaggagggctaaggcccaaagtgcacttgaaaccctgcttcataggaagaaggcctgaatgatgtacaggagatgatcaaaacggagaagtcctacccggagcgccgcctgcggggtgtgctagaggaactcagctgtggctgccagtgagactgatggagagggcagggtgggacatggggacactctagacaggtcagggcagaggtggctaagtcctggctcttctacccctacccttctgcagccgcttcctctccctctcggacaaggaccagggccgctcgtcccgcaccaggctggatcgagagcgtcttaagtcctgtatgagggagttggtgaggccacagctggaccctgggaccacggaaaccaatgaacagagaaatctgtccttgaggtcatggctcaagctgacacccaaagctgaatgctcctcccacactcttcccaacaggagagcatgggacagcaggccaagagcctgagggctcaggtgaagcggcacactgttcgggacaagctgaggtcatgccagaactttctgcagaagctacgcttcctggcggatgaggtatgtggcctgagaaaagggcagcacagagaggctgtcccgcttctcagggaggcctctgccactccgacagcccttgttgacaaggttgagcaagcccagtgggagagaaaggaagacccaagacgagggtccttccttttcacgccccccagcttttcctcagctaggcccagctcccaggagtgaggttcagcaggctcagggtaccactctagtgaggtcccctggcttgtgccctcggccctccctctgctgcagccccagcacagcattcctgatgtgttcatttggatgatgagcaacaacaaacgtatcgcctatgcccgcgtgccttccaaagacctgctcttctccatcgtggaggaggaactgggcaaggactgcgccaaagtcaagaccctcttcctgaaggtgctgcgggggatgggccaagctcgagtgggtggggtgggttcctgtagcgactccgatgaggctggcaagcctaagagcaggaggtggagcccttaactagcaggtgttcgggggtctggagaccacctgtccccacctgccttccccccttagtctctcatacccagctctgtccggtgagggggtaggtgaagctctatctacctctgcctaaagcttcaacaccaccctgggcctcccttaccctgggagtcctggaaattctcaggctcttggtgaccctgagcctgcccctagctgccagggaagaggggcttcggctcggcaggctggacagtacaggccaagctggagctctacctgtggctgggcctcagcaagcagcgaaaggacttcctgtgtggtctgccctgtggcttcgaggaggtcaaggcagcccaaggcctgggcctgcattcctttccgcccatcagcctagtctacaccagtgagtgaggcctcctgatcctgggtgggctactgtcccagcttgtactcccaggggggccacaggggctgcaaggcatggcttagcccacccttccccacagagaagcaagccttccagctccgagcacacatgtatcaggcccgaagcctctttgctgctgacagcagtgggctctctgatccctttgcccgtgtcttcttcatcaaccagagccaatgcactgaggtgaggacctgaaggggaggggacctgagggagaggaaccctgggcttttgggagaactgggaggccagtactattggcctgctagttccccagctcttcagaggaaagtccttcaggtaattggctagggtagtagaggccaacagcttggaccatgtccacaaggcaagggagaccagcggggcactgggaatagacatcacaaaaggcttgacttggggatttctgggaaagtaggagaatcgatcattcctgcctgcagggtttcccagcatgggaacagtggctgccacttcttccccatccctcaccccatgatcaggttctaaacgagacactgtgtcccacctgggaccagatgctggtatttgacaacctggagctgtacggtgaagctcacgagttacgagatgatccccccatcattgtcattgaaatctacgaccaggacagcatggtatggtgggcactggcaccagtgacctctagcagaccctccccttgcaagttccccacctacccctgaagctctacacaggctgcctgtgttgggaaactgggctgctcatcgagctttccaggtgcctcctgcccacccaccacagtctgatccttttccagaaccatgagccacttggggaccaagtgcgaaccatggtgtttcccatctcctggataaacacactgaggccaaatcttccagagatgtaccaggaagccctggtacaccccaccctagggctctgatccctcactatgctcagtcacaatcaggggccatctccctgctttccatggagattctagagtggagaggaaagatcaggagaggccaacgctgcctacaagccaacccaactgttggggtgcccaagggaaccctagagttttgttgtgttagggcaaagccgacttcatgggccggaccttcgccaagcccctggtgaagatggcagatgaagcatactgcccacctcgcttcccgccgcagcttgagtactaccagatctaccgaggcagtgccactgccggagacctactggctgccttcgagctgctgcaggtcagggggcaggcaaagggggacagggctgggagtcggatctcagggggccttatgctctctggcctgcctattctcatgacaccaactcactgggggagggacccctctccctgggctcgccactgagatttatgacctcattcctcagattgggccatcagggaaggctgacctgccacccatcaatggcccagtggacatggacagagggcccatcatgcctgtgcccgtgggaatccggccagtgctcagcaagtaccgagtggaggtgcgtgagggctccatgcccctccctgccctgcctgtaaccttcgcccaagtcacccggtcctctcccttttgctccacgaagcaccatgagtgcccattctgtgagccgtcaaactcctagtcccatagggatgcctctcagtttcagaaaaagatacggagggcccagagtggaggggacttgtccaagatcactccttagtgacagcagcactgacacgggccccagcccaggctagtgctatcctgctctgacagagtcgcatcactgagcccagagccattctaggccctctgccttccattgtgatccctaccctcaaagacccttacctcggtttcctcaggacattcgcctcatgcagtctcctgacaccgtcctcactgtgcctgccataccagtctagcttctcctcccacccggttccccccagacaccctccccagccaccactggctccccttacagaaccaccctccccctacaatcaggtgctgttctggggcctgagggacctaaagagggtgaacctggcccaggtggaccgaccacgggtggacatcgagtgtgcaggaaagggggtacaatcctccctgattcacaattataagaagaaccccaacttcaacacgctggtcaagtggtttgaagtggtgagtgtaggagctgacagatccgggcggggctaggtgtgaccagtgtggtttaccttagccggagcctcctcagcccctttctctgagacgtagactgcaaaaatgtcaccactacccgtcaggacctcccggagaatgagctcctgcacccacccttgaacatccgagtggtagattgccgggcctttggacgatacaccctggtgggttcccacgcagtcagctcactgaggcgcttcatctaccgacctccagaccgctcagcccccaactggaacaccacaggtatggcctttacctaaagcccaggcctggctctatttggcttcttgaagggcctcgcctccaggtctagcctcagttctgctgtctggatgcacaatgacccacccttccctctaactcatttcccttcctcacgcccatcttgttcttctacatgtcctgtccctcctctgccctgagagacttccagaggagtccactgaagatcacgctcttcctgccttacttcatgcctctcactgtaactctgttcctcctctctgtctgtctgtctgtctgtctctgtccagtcaggctgctccggggctgccacaggctgcgcaatgggggcccctcttctcgccccacaggggaggttgtagtaagcatggagcctgaggagccagttaagaagctggagaccatggtgaaactggatgcggtaaggcgaggggctggcccaatgctggtcgggacacacgggcacaggtagcactggcgagccgggcaggcctgtcctgagagtgcagccctgtcttgtctctctgtgtacttttcaaaagccaaccttgatcacatagcactgtctggaggcagggtactaggggctcgggaagcagatgatgtgtacaggcaagccgtggaactgtaatggttagaggtgacgacctgcggcatttcacttcagaaacgagcccctaggtgatggactgcttgtgagacaggtatcttttggacagggccattttccatgccaagtgctgcctcaagttggcccttggtcacattagccaggtgacctgctcttctgaatgtgaatgccttataggcaagagcaaggggcccccagccgtgtgtactctcctgccgcctgccctttgcgggcgggggtggggggggtggggggggttactgcctgccccctccattagttctcagtggctaaccctgccctctctccttggttccttccctctgcagacttctgatgctgtggtcaaggtggatgtggtaagtgtgggaatcctgcaagggcttttgggtaaaataaccattccctgacaccaatgctaggccagaaggaccttcatggacccagccatccttctctgagtgccagtcctgccttggcctgtggctcctcccacaaagccttgccattggtggactcacagcagtatgggtcagggatggtactttctggggtcagatggccgcagtggataggaatcattcagggtcctgggaaaggatcgagtgtaggaaagccgacgggatggtcaacctggccaaccctcaggctgaagatgagaaggaaaggaagaagaagaaaaagaaaggcccgtcagaggagccagaggaggaagagcccgatgagagcatgctggattggtggtccaagtacttcgcctccatcgacacaatgaaggaggtgaggcctgggcggggcctggggataaggaggaaaggagggggtgggctgcagctgaaccagctagacatccacctcctctccagctcttcccctaaccctcagagtcagctcggcagctctcccttcagactcctccctcctccggttgatgggcagttcacctcctggcttagtccctctcttgtcagccacgtgttccacaaagagctctgacattttcatgatgagccagataccatactagatgctgtgtgagcccaaagataggtgccacaaaggccctgggcagctccagccttgtgactagaagctgaagacgccacgggctatggagacatcaagacctgggaagtcaggaaagccccttcgtgttttggcagcaacttcgacaacatgagacctctggaactgacttggaagagaaggaagagatggaaagcgctgagggtgaggcctggcccccagcatctggacccctaggtccttgcacccatgacaatacctgcttcttcagccctggcctgggctccaaggaacaggctaagggctgctacagtaggtcactctgatcagttcagcaaccatagcagccggcagacatggagatcaatagaacacctgagctggaagggacctagcttgttccacattttacataaccttttccatgggactacactgatactattctgaaaggaaagaggaatctggggtcagatctgactagaaatgttggtttatgtgagttccttcagagcacgacttctcagagcctttttttgccctattgtgatacaagtgtgtgtctctttgtgtgtgtttatgtgtatgtgcatgtctgtctgtctgtgtgtgtatgtgtgtctgtctctctgtgtgtatgagtgtgtatatctctgtatctctatgtgtatctgtgtgtatgtgtcagaatatatatgaatgtatgtctctgtgtgtgtctgtgtttctgtatatgtatgtctctgtgtgtctgggtatgtatgtctttgtgtgtctgtgtgtgtgtgcctgtgtctgtgtgtgtacctgtgtctatgtgtgtctgtttgtgtgtctgtatgagactgtgtgtctgtgtgtgtgtctgtgtgcatctgtgtgtctgtgtgtctgtctatatgtctatgtgtgtctgtgtgtgtgactgtctgtctgtgtgtgtctctatatctgagtatgtgactgtgtgtctatgtatctgtgtgtgactgtgtgtctgtgggtgtctgtggtgactgtgtgtatgagcctgtgtgtctatgtgtgtgtatgtctgtgagtctgtgtgtgtgcatattgtgtgggaacatcagtgcctgtgtaccacatcatgcactcagagctcagaggataactccccgtgctagtcctcatcctccatcttgtttgaaacaggctctcgctgtctctgtgtacaccaggctaggtggcctcattgccgctatgtacaccaggctaggtggcctcactgctgctgtgtacaccaggctaggtggcctcactgcctctatgtacaccaggctaggtggcccgggagcttccagggactctcctgtctctacctcctatctccccataggtgttctgggatcatacacactgacactaacttttacatgaattccggggttcaaactcaggtcctcacactcaggtagctagttattccaccctctgagccatctccccaagcactggtgttatcaatttttcaaagaaaatactatataaatgatttcctcgttttgtctacgcatgacaatagcacttaggcctggggttccacaggattccgcttgggaacactagtaggaagcagccttgttaacataaacctagagaaccagggcagcaggcagaggaccgagcagccacgggtgcctgactccagatccaactcctcccctgctctctctgtctgtgcccctgtctcaggcatgacctgctatctgcagctccttgtggaatgcattgagactccaaagttaaatgggaaaagggtggtggagctgggtctggggctcaggcccttcctgctctggcccttcctgccctacactgccctgggttgactagggcttccttttctactttgggccaggcctgaagggaccaatgaagagcaaggagaagtccagagctgcaaaggaggagaaaaagaagaaaaaccagagccctggccctggccagggatcggaggctcctgagaagaagaaagccaagatcgatgagcttaaggtgagggcctgggagtaggccttgtccagatgatgggtgggaggcagaagatggggcaggatgctggcctgaggcctgacagcctgtcctacccaggtgtaccccaaggagctggaatcggagtttgacagctttgaggactggctgcacaccttcaacctgttgaggggcaagacgggagatgatgaggatggctccacagaggaggagcgcatagtaggccgattcaaggtcaggcaaggagcatgacccagccattgaccccacaagctcatttccttacatccctccccactgcctctgaaatcctacactgtccatggtccagcagctgaagtgttaaggcctggtcacagcacgtacctgcgcccttggctagctggccctgtcctggtgaatctgcagcctgacagccccaccctgtgccttgctccagggctccctctgtgtgtacaaagtgccactcccagaagatgtatctcgagaagctggctatgatcccacctatggaatgttccagggcatcccaagcaatgaccccatcaatgtgctggtccgaatctatgtggtccgggtaaggctccctttgcatcccctccctgcaggcctccaggccgcctgctggagggactgcttcaagacattagaagaatccactggcttagtccccatatttctagagaggaaagtcagccctggcgacaagaggcagcaacttccctagtaccacccagtgagacttctgtctctaacccaatgcctctgtccccacttctcaacatcatgggaccctcaggagtggggtgagggcacccatgagtctgcttaggcaccacttaccctgcctaggccacagacctgcacccggccgacatcaatggcaaagctgacccctatattgccatcaagttaggcaagaccgacatccgagacaaggagaactacatctccaagcagctcaaccctgtgtttgggaagtaaggcctcaagctgccctctctgcccccctggccctccgtccagtcctcactccttgcccatctcaagctgtacccccttcctaacaccccctccatcaggtcctttgacattgaggcctccttccccatggagtccatgttgacagtggccgtgtacgactgggatctggtgggcactgatgacctcatcggagaaaccaagattgacctggaaaaccgcttctacagcaagcatcgcgccacctgcggcatcgcacagacctattccatgtgcgaggacagagtggggccggtcgctgggaggggctggggacagactggtgacaggggttgggaagggactggatgtctgctgcacagctgcatcttaacactaagacaagactccaggtggtaatttggaaaggtaaacatgccagggtttcagtcaggtgtgtgccttcacttcacactgagtgcagcttcaggagccaggcctgactactccacgataccatacagacgggattccatgacaaaggagtcagaatggggaaagaagaaaggaatgggacagggcagtggataaagaaagcccttagaggatctgggaaggtctctgccttggtcaagtcccctccttctctggttacctgatgcctcacaagagccctgggggggggggggcgttggttgggaagcactcgatgtcaaagacaaagacaaagtagaaggaccagcccccagcagccctagtatcttgggtgaagctgctggaggctcattgctggtgtcagcaacggccagttgtggaagagtagccagaaggatctgggatgtcccagcctgaaaggcttcacgcctgtgtgtcttctcccacccacagacatggctacaatatctggagggaccccatgaagcccagccagatcctgacacgcctctgtaaagagggcaaagtggacggcccccactttggtccccatgggagagtgagggttgccaaccgtgtcttcacggggccttcagaaatagaggatgagaatggtaagggacattggaagcagctgactggccctcctccggggccttcggtggggcttcagagagccacacttctctatgggggacttctagatgtcctctagtgaccctgtgctctgtgccccctccagtctgcccagcccctgccctcacaccttctcttgtatctcacacactatctcccctctttctctctcattcatctccatgggtggggaaaataacccattttacagaagagcaaactgagaccgaacaagttccagtttggtgacttgaccaaactcacgtatctctacagaggcagagcaatggtgtaggcccaggtctctcagacttcaagccccaccccatcccctacccaccctgttcctctctgtccgtgaggcacttcccagaggctggagaagggtctgtgctggagtacttacacctccacagaaggggtttctcctccttggtccctccctttcacaacacatcaggggtctctgttcaacttccctaagcctggtaagtgggggtcatgggtctctctggagccagaggtgtagctgagaccttggccctcctcagtgtctgtctccctagcaataaaacaaaggtaaggtagactcggggctttgtcacagctcagagctttgttctcctaagcccatggcccccatctagagcccctggttctgaagaggccaggtgtatgcacctgatccactggacttcacaggtcagaggaagcccacagatgagcacgtggcactgtctgctctgagacactgggaggacatcccccgggtgggctgccgccttgtgccggaacacgtggagaccaggccgctgctcaaccctgacaagccaggcattgagcaggtgatgtgcacacggctgcaatcctaaggatagaaatggggttcacaatattccctgtgtcccctctgtatgcccacataccgccccactggggccaacttgaatggcaagagtggttctgagacccacatgagactgttggctccccaccccagaagctgtccccggctattggtgacattataagacatcctagcatccaaagctagaaactgatggcatgcacttttagctaggccaggagcagaaggaaaaaacgtcactcagacatctgtcacacccctctcttcctcagggccgcctggagctgtgggtggacatgttccccatggacatgccagcccctgggacacctctggatatatcccccaggaaacccaagaagtgagctgcctgggcacgggcaccatcccctcaccctgtcccatctacttcccaccacagcctagactgtccttcaggcagaaggcagcctggattagtcactactccagggcctcaggtgtgaccagacctgctctaagtggggcactacctgctctgcccacagtgaatgtgatgacccacaccccggcaccctcttccacatcatagtatccccctcacaaagacatagccacccctcaaagccacctgcactcacaactctcccctctcctctcccctcctctcccctcctctcccctcctctcccctcctctccctctccccgcctctccctctccccacctctccctctctccctctcccctctcccctctcccctcctctcccctctcccctctcccctcctctcccctcctctcccctctcccccttcccctccccctccccctcctcccccccctctgtctctctctctcacacacacacacacacacactcctactacaggcacgcagaagaacctatcagagcctattctgtaccactctcacattttaccagcctttcttctgggtgactgcctgaaaaacaccagagatggtagggtggagggagctccccgatgtggagctaagccacctgcctcacctaggcagtcttggctcctggaactgagtatcacactgaataaggtgtcagggtggtcactgcccgttccgtattaccagtccctgggtttggggccaacctctgggcgtacaaagctatctgtgttcttgttttccaaccctgatgttgccgtcctcaatttcttaatgacagtcctgggggttgaacctacagtctcgtgcatactaggcaaatactctagccctgagctacctcttgtttcttgaggatttttaacctgggattggggccagtgtttccattttactctggccacaagcaaatggtgcagccagctctgcctgtagcaacctccagcctgaggctattagccttctgttccaggcttgatcacaaaggggtaaacccagctctgttccagagaaccacattcccacccatgaacctcacgcataatggttgaaatgtaaccacctcatttgtagtttcaactgaaactcaaagggaacatcctctttgaggatgaggacataaagaaacccagagtccgtgggcttccactttgggccactgggcttcactcagaacttcttagaaatagagcaccactcctgcctttagacacacatggacagactatgctccctgcctcatggtagcagcccccctgcatggggacaactgtgcatggccacgctcctcttcttcctcccatattagccccacaacccaggagtgttcatgggtgtctgctccagactggctggtttcccccgaggaaccctgttgtttgacccaccaggacacgactggacagaaacctccctctagtctcctccccaactctcccagcccactcaagactaccagggcttctcttgctagcacataagagaccctgatctgtccccagaacctgggacaagccctaccccaggctgctgatgggcttccctacccgtccaggtacgagctgcgggtcatcgtgtggaacacagacgaggtggtcctggaagacgatgatttcttcacgggagagaagtccagtgacatttttgtgagggggtgggtgacagtcacagactgagctgggcatgtccgcttttctgggagaaggggatcctggggtgggaagggaccctcgcggtgtggccacagagctggagcaggtgactcctcccagcaggtggctgaagggccagcaggaggacaaacaggacacagatgtccactatcactccctcacgggggagggcaacttcaactggagatacctcttccccttcgactacctagcggccgaagagaagatcgttatgtccaaaaaggagtctatgttctcctgggatgagacggagtacaagatccctgcgcggctcaccctgcagatctgggacgctgaccacttctcggctgacgacttcctgggtgcagagcagagacaggcctagggcccagagctgaggggcaggggtgggtgggctgagtccatgggaggggtcacctagtcctcagagccagagatagcaaatgggaatcttgcctctccaagaatcttcccagttgcttgttggggtcataacgggaacagccaggtgtagtgggtacaccaggtagtcgaggtaattactgatgggaaaccagcaagaatctctaaggaggcagatttccctgggtctcagattgcaccaaactctatctgcatctgtaagcctgggtttggtaagacttcagtggatgcactatagccaggatgaagatgtctagctaagcgagggcctgagcaaaacaaaagtgggagtggaaaagaaggaagcgggacagtccccacccctgccacgcccacccgagactgactccgatacgatgttgccacaggggctatcgagctggacctgaaccggttcccgaggggcgctaagacagccaagcagtgcaccatggagatggccaccggggaggtggacgtacccctggtttccatctttaaacagaaacgtgtcaaaggctggtggcccctcctggcccgcaatgagaatgatgagtttgagctcacagtgggtaccacttcctgcttgggatccgacccacaggggccaggctgggatacctagccctgtgggtcagacactggaactcttctgttctttccttcagggcaaagtggaggcggagctacacctactcacggcagaggaggcagagaagaaccctgtgggcctggctcgcaatgaacctgatcccctagaaaaacccaagtgagtacccgcctgcctagaccccaattacaccacaccacgggagccgaaaagagaagagggcccagacccttctggtcttcttgcccttacttcagaggcaactactttgttccctcctggcccacagacccatcatgggcttcaacccttcaacccttccttcaaccccgaagctacctcttccctctgaaccaaaagaagctcatcttcaaagaaagctgttgctttcccaggaagcccagcccccaagtctgacagtggtatgggttcttcctagtttttgacaaaggcaatgcaagcactccaaaggtggccagacttggtgccagaaactcctgcttggtggaggtctctcaccaaaccccttcccactctcctgctatttccctgtgcttgtctgctcttcccaatgctccagtcggccggacacaagcttcatctggttcttgaaccctctcaagtctgcccgctacttcctgtggcatacctaccgctggctactcctcaaattcctgctgctcttcctcctgctgctgctcttcgccctgtttctctactctctgcctggctacctggccaagaagatccttggggcctgagccctgcagtcgcctaggcctggtacttcttccttctgcctttggacaagggcgggccagcacatgggacacactcaacagacacacataaagttcatatgtgtacacacagtgcacacgcatgcagaagtgcacacacgcacataagcatacacagaatacaagcacatatgtgcatccacataaacatgtattgcaaactttcgaactttaaatgtagtcatactctcatcagaaccagaaatgactcttttataatttttatattattgggacagagaagtgacatagcttgtccaaggccacctggctaggtggccctgggtctccagcctaggtgccaaagtgccagtctagtgtccaccggctgcagcagtgttattctcggactctactccagttccacaagcaagaggaagctgagacgtgggcggggtggcacagggggcagggtttgtctagggttggcaagctgttctgaaacagttcctccttgtgtaagaggcctccttgagtacagctggctcctacccccagggaaattgttccaccagggaaaacagttaagctgacatcagcctaggaccgtgtccctgcaggctttgagattcaccagcatgttctcagttcactgcttccctaggtccagaaagtaggaattcctgttaaagcatcttacaaacgaagaaactaagactcaagggactctaacctgcccacaatatctggggatagaaactcaggcaacttggacccacatccctcccctgatccccctcttacaatggggttatggcccacatcctctgaaagatgatgggacagttgttgggaaagtatatccagaggctagggagatagctcagtcaaaagtgcttgcaacacaagcctgaggaccccaggtcaagtccctagcactcacaaaaaagctagggcacggttgtacctgagcctgtgaccccagcactgttggaagtaaacattggaggatgtctggggcttcctgggcccagattagctccagatcagtgagagaccctagcttaagtagagttctacagcctctctctgacctcctatgcgtgcacaggtgtgggctctggcatgcacacgcatccaacactttaatttgatattgtgacattttatggggcctgctgatcttgtgacacaaactgcagacagtagaggctgacaaggggaccttaccaaggaactctgcagaaggcagagcaggttagccccttgatggcgggcaagttgtggagagtgaggcacggcgctcaagctgcacaaacgtttgctgaggacattatctgtgggtttatcataaagggagggtttgatggccagggatggggctcagtgggtagaatatttttgcagcattagtgaagccttgggttcaatggcccgggctacatatgccagtggtaatgaggcatgcctagaacccagctctcagccggttagaagcaggcagataagaagtcaaaagccatccttggctacatggtgaataaaagaccagcctaggctaattgagaccatgtcccaaaaaaggaaggaaggaaggaggggagagagggaggaaggaaggaaggaaggaaggaagggagggagggagggagggagggagggagggagggggggagggagggagggggggagggagggggggggagggagggaagttgagcaattctgatttcctgagaatatggggagacagaagcctgcatgatgtacaggcgatctcaggaaggacgtgtgtggcctgtaataccagggtctgcctcaattcatcattgcaagcaatcggggctgagtccctgacaaatctgccacctaggctcagggcagagctggcacagtgaggtctccccgagaagacaggatctagaagctggcaatctgatactagataagggctccaccctggctctagcactcactatggaaagacagaaagatgggagacgtgtgtgggtgtgtgggtgtatgggtggatggtgctggttatctgaccagcccctcctgtcttctccccaccctagccggcctgacacggcattcgtctggttcctgaacccactcaaatctatcaagtacctcatctgcacccggtacaagtggctgatcatcaagatcgtgctggcgctgctggggctgctcatgctggccctcttcctttacagcctcccaggctacatggtcaagaagctcctaggggcctgaagtgtgccccaccccagcccgctccagcatccctccaggggctgctgcgtattttgccttccctcacctggactctctcccaactccctgaggagccctcccacgcctgccagccttgagcaagacacctgcttgctggacttcatccccaccccacacccaaactgttgcttgcctgatcttgtcccaggcctgcctggggtttggggcacagttggcctccaaaaccagataccctcttgtctaaagtaccaggttcctctgcccaaccccaagagtggtagtggcccaaccctccctgtgctttccaaatcttgtcttaaggcaccagtgaaattaaccaagaaacgcggagcaatgcccaaggctctgatgagtaggaacacgtggaaagcaccaggaatgccagcagaggcgaggcggcacacctctctgcagagcatccaggccgagcggcgggcagcggccagctgcttctgcgcatgctctcctcttggctctgcttctttctcacagtcacagtcacttcacagcttagccttgggcttcccatcacttccaggggtgcctctgccttggccagtgtgtgtcagctagtacacaagctccaagtgtgaatcaggtgtactggccgtcctgaagactgactgccctgtccttcctgccgacagccacacccgagtgtacacttaaagcggtgcccttctgcctctgtgggcctgctggctgctgttcctttcttgagtgtgattttttttttctctccctcaataaaataaatcaaactctgagac

SEQ ID NO: 16 - DNA, 136666 bp, Danio rerio
  source 1..136666: mol_type = other DNA
gtgcggagcggcggcgcatcacagtagtgtcaaacactctcggatcggatctgacgactgtactacatgtgcgggagaaaatgaaagctctttaatttttaattactcctttttatgatattgcgcacagaggatgcagcttgtacagtgaagatgactcttcccgtttatatatgcagcaaataaaagcagttcggattttataacaagttaagcagcggtggtcatgagaggtctgcgctctttgtgatgaatcatatatttttttagtgttttgactctttttcattgtgagttgagatggctttagtggtgcatctgaagactgtcacggagctccgtgggaagggggaccgaatcgctaaagtcactttcagaggtaaagagcgatactttttttcatttacagtgaacgggtgtgtgctcgactctattgtacgcatctcggcatattcacgaataggtttcattttgttttagcatattttacgcatacgcggtggtggtaacttgagattctgatgaaaagttgtagaaatctgttcatgtaactattctgctacgtatttattcaggaaaaatcgctttagatgaaaaatagatcaaaaatacccatgttaataaatgacaacaatattcacagacataacttgagctgctttctcgtttggtttcattagattttcttttccagtgcatttaatgttcactgttgtagctaatattcaattaatcgttgatttaagctgtacagcatgtaggcctatgtatattcatcccaataggctgtactgggatccccttgcagtataaaatgcattaagttttaagcattgaagagtaaagcagatttgtttgaagtcttattgttaagtcttgtcttatgcacctttctgaacaacatgttagctaaatgtaatgcacgttaggctttacattactttgttttagttatatttgtttttcagcaccttggacagttgcgcagtgttcatctcacagtcattttctttctcataaaatgctctctctctaaaagaatattacagaggtaaatggtgcagaaatgttctaggacaaacaacattacttctaataaaaaaatatgaagcatgtgttaaaagactaaatatcttctagtattgcatttttttcaaacagtatttagagaatggtattatgtaatactctgaaagatgcaaatttagcatgatattctgtgtatgctttcataaactccccagtccagtaatttgattgagacacttcaagggatttaagtaatttgctttgtcatgtttttcctccttttctatgagggcaatgactattagctctctttccaccctttccttccctcctactttgggcttaatctccagcacctcagtgtttggcgatctcggctgtctggagcggaagggctccactgagctgtgtcctgtttctctgtgggttgcataacttagattgagtatctctaactagatcttagtacaataataataataaaaaatcactgttattttccactaaatgttttatcagaaaaaattatggaataaaaattttaaataccgcctaataaataatgcaaataattaacgtccttgtaaaggctacaaattattgaaaatgctgtttgagattttcttgctgctcgaaaggttgctcatcaatttttatcaaaccttcccaagtttatgcatattacataaccagctttcatctctcattttatggttaccagtgaaaaatgttttatgctgtaagcctggtgatacttagcgtttgctcttagtttgttcttaagtgtccaaaactatagtttgcaaaatgtgtttaatcagtacttggctttatgttttgactttgaagtgagaaaaaaaaaatcctctccagctgttttgttatctatcacactgcatgtaaatgttacctttgggagaagcttttgtgagcaacagcactgagcaatgagtttgcaatgagctaaaaacagtgctgactgtattttgcgatcttgatgcataatgcaacttggctatttttactcttctaaaactgtttgacatgacatttagcggggccaggcagtggcacagtaggtagtgctgtcgcctcacagcaagaagttcgctggttcgaacctcgactcagttggcgtttctgtgtgaagtttgcatgttctccctgccatcgcttgggtttcctccgggcgttcctgtttccccaatagtccaaagacatgtggtacaggtgaattgggaaggctaaattgttcgtagtgtatgagtgtgtgtttgtggatgtttcccagagatgggttgcggctggaagggcatccgctgcataaaaacttgctggataagttggtggttcattctgctgtggcgacccaggattaataaagggactaagctgacaagaaaataaatgaattaatgaatgacatttagctgaattgttcaacacagaatgaagtcaacactagacaatggattccattaaattacataaaaaagaagtattttctcagctgtatgtgatgcatttgcatatattataaaaaatggaaagcacttatactgaatatagtaagaaaaagcacttattttaatcaaaaaggctacagctaatgatcatctagatatttacttttcataagaaatgagtttatgtttgcatgcatatgtgtgcgagttggtatgtaaacatatttatattgacccctcttgttagcttgtttacaagcacacattgacgaaagtcaacttgcacttttcaatattatgcaggtttccttaagatacaaaggacaaaaaaataggcattttcatgttttccctgatatttctgaataactgcagtatttacaatatacagttcacatcttcacctatttttaatgtatattgcagttttatggtaatagtagcgtatatatatttatatatatatatatatatatatatatatatatatatatatatatatatatatatatatatatatatatatatatatatatatatattagggatgtaacggtattgtaaataccgtcataccgcaatataaatttttttcgatattaccgaagtcgcatgactcggtaaaactatagtgcttctgagaaaatttgctcaggcgaatgaagcgaatgggaggtagcgaaaactacaattcccatcagcccatgcttgaccatcatcccttgcggtctgttgtcgctacagatccagtaatgcggaaatggagtgtgctgctagaagcggggatgaaaaagagctggaaaactctaaagcgggtgttgtcgccgcgcgcgtactgaatatcggtgttgtcgcgcgagttcttatcagctgtgttgtcgcgcgagttcttatcagctgtgttgtcgcgcgagttcttatcagctgtgttgtcgcgcgcgtactgactagcggtgttgtcagcacactgttcagattgatgcagacatgagacctctatcttactcatggtttgtcctctcaagtgggggaaagacaatgcacaacgttacccactgctgtcaacctgggccaagtcatatctctcttgtcccagaaacctcagtcccaaatgagaggggttttttttctgttgcaatggacattgtaaatgcccagagataccagcttttaccagattatatttatatgataattttcctttaaacccatctctatctaagtgagtgagtgattaaatgttgaatgtgatgagttttcaacaatactaaattgaaactttattttttttacatggtttaatatttttttgttattaaaattgaagttcctgtttcaaagcttacagatagatggctaatttgtatgtcattgacacttttggcagttttttggagtattttcataagttttgttttttcctgtaaatgattcaataaataccgtaccgtgacattcataccgaggtattaccgtaccgtgaaattctgataccgttacatccctaatatatatatatatatatatatatatatatatatatatatatatatatatatatatatatatatatagaaggtctcataacagttacataagatacaaaatgatattctttgtgtgtttatataatactaaaagtaatataaagctagtatgaacatttgaactgagcctccacaataaagatcaacaaaacatcctttattttttgaatttcctgtgaaaatgcactgaagatgcacattatttgtaatttaagactttgttattaaataaacagattctagcatatattagatggacgaaatggcaaaaatctcatttcataatacagtatgtcatctcatatcctgataccatttttgtaaactcagttcaatgtacttgtacatattgtatgtgatcatattttttaatgcatttagaacttcagggcaaaaatttcattttaaaatgtacaaatattaaataaataacaataaaaattgaaaacaccttccaaaaactaatgataatcagtccaacataaaaatataatcacttaataaaatgttgtactttcaagattgcaactttcttacaatgctattattattcatcctttattatcaattcatattattatgttattacttatgtttctgtctgtaaccctgtaatgtcatgtaatattgcactcatatacgttttgaaaatatactactataaacaatgaattttatgacaccactacagtatatattaatgatagagcataatatgaaaagatgacttgcatatacaatatattgtcatattgcacagcattaatggcaggtatgctatactatatgtctagtgaagttttattcaagcatcaaatgaaacagcatactctaaaaggtcttgaaaggcatagactaaaagctcttgagacttaagttattgatattaatttatttaaattactatgtgtatgtttttaaaggagttccacacagtcaggtagtggtcaaaacagatatgatcaatgtacatgtgcaccaaactaaaatatatatacacttttgaattgaattgaattgaatttaatttaatttaattgaattaaacccccaaaactgtctctttcctctctatatatacagatgagaaagaaagtaattccagtgatagttgctgctgtgagattctgctcaaccatattgaccttctaacctttttttctccctgcaggtctctccttcttctctcgggtgttggaaaactgcgaggatgaagctcgatttgagcaggtcagtattttttttctcttcacaatctctccagtttcccctactaactcaagcatgttcaagtgtgacagcaacatcgtagacctacgggcactcaaacgtattatactgtatattcacttcaaatttggtttctctccccaagagaggaagtgatgaaggaatcacacaaagaatcaaaccactcgaccgtggccagacgcatcacatttagccccgctgattcctattaatgctatttgcacagaccctcgggcaagcaatacagcagtatatgtaataagcttgtggatagcttaaattaccattagcataatacagttctttgaatgattgctctctttacttgaaaagatacctactggttcagctgtcagcattgtatttatgtaaatagccttcttattcttaaagggacagttcactaaaaaaaacaaatatttgctgttaatatatgggccatccaagatgaaggtgttagtgaagaagattcttagctgaaaatgtggtccgtggtgattcataaaaaacctcaaatgaataccttgggagtcatgcagataatttaatttgacattgggacacacattttcaggtacaaggtacaattcttgttattattaaatcattaactgtaatttagctcagtaaactcctaattttctgctgattaatacagtaatacagttaattacagtagttattaaggtagtagttgggtttctgcattggataggattagagattagaacaagatcatgctgaatatttactttataagcaaggttggggaaagatacttttgaaagtaatgcaatacaatattgagttactcccccaaaaagtaactagtcatgttacttagttactttatatagtacagtaagtgttgcgttacgttactttagcgtttttatttcctggcttaggcttgatttctttctgaactttttttttttttttttttttaaatagaggagctctgcaattaacaacacactgtaaaatctacatctacatttacctttaggaaacgtttaaaaaattgatatttttggataatattatctgagaatgtcctgacccctatatatgctatacatgccatatatacatattattgaaagtttaaatgctccttttgtactatttgtcttaagtaaaatcactgtctattgagacaatgcccttttctttgatacggtcaaaataataaacacattctctcatcgactgtgtgagtcattgtgactaatcttaattcagcaattaattttttaaaagctgattaatttaaataaaaaagtaacttgccttacattttcaaaaaagtaactccaatattattacccattttttttaaagtaatgggttactttacatattacttaaaaagtaattgcattacccccaatcctgtttataattactaataaacagacaatatcttaaaaaaggcaggcattaaaccactgataatagtcagaattggtccctaaatgaaagtgttaatgatattaaaatgaacatgagtgattctatggctacattgtgtgattatgattacaaattttggaaaatttttattttgcaaccagagagtgatttcaaactggaaatagcatgatctctacctccatagggaaagattaaggcagatgctgtttaaaacatttcagataatttatatggctgtatacacagccatacgtgtctaaaggtgaatatttaatcaagctctaaacatattttgagaaagatcattccagagttttagactttgccctcttaagtactgagagttttaaattttctcaccttacagaacgtgatagacttgcttgaaactaacaaggctgtgctgaaaaattggaactaatcaatcggggtcctcgactagattttatctccgattttttgggaggtgaaaatctggtataattgaggttaaaactcctgtagtcttagcctgaaataaaatgcaaaagagttcaacttttagagctctgcactgttttaagtagcacttttttgtcatttaaatgacagaactataaaaatcatagtgcatagcatataaaattgaagtgatgtgaatattttcttgacctgaacttagggaaatgcaagacaaccatataaaagagaattgcaatcatccaggcttcatgtcataaagcagaaactgatgtttacaaggcagtttctgtaaatttttgtaataattttgtgaagtcttcaaaagaaaagttgctgtctaatacagtataacacccaagtatttgactgtacaggatgacataactgtatatcaatctattaccaaattgttttgtttctgtgatttgcacgagtttgtatctctgtcttgtttgaattacaaataagacacctataaatctacctatagaatctcttcatgtgtgcacattctaagcagaaattcaattacattttgctctctgtcttgattgagactcccacattattgttagcctcttctcacctttgtaaggttgtttttttcagtgctgaaaacaaaaagcattacaaaatttctgtctggctccaattgtaaacttttaggttaaaaggaaggatgtattttcactgtatacacagtcagggaaggagaatgagcgactcgtagtgaataagagaataaacaaaaaaaattacttaaaaattagcattgtctaaatgtaggaccatacagttgacacagttttgatgctaagcagtggcaatttttaatctttctgtctttgtttgccttgtgacctttccgggtgacctccagcctcttcatttgctctcaatccttcacttatagttttatggcgatagtttaatcattactaggtggttagagaaggtcagtgcacacttcaaattcactgagcccactcgccacttgtgattacatcacagacagttcacatttaatcattgtgctgtactactgtatttctctgtctctccttacatatctaatatcaatatatctgcatttggtgttgagtaaatgactaaataatggctgaatttatttttgttttttttaaattttacatttgtttgtttttggcaccggcattagatttttttcattaggtttgccaggcaggaaagatcaggtgtcatattcactagaagcaatgtgatatttagtgtacatatcactgacgttcatcgaaagcagagcataaactgaaagtaaacagacttttatttaaaaggaatgtttgtttaaattttctattgatcgtgacagcttttatttatcatttgaagttcagtgatgatcaaagagtgctatagctgtgcatatattttaaaaaatcaagaggaaaatcacattgaattgcattgtaaaaagcttaaatgagctctgcgtgtcagattggggttttctgcatctacactacatggagctgtaaatttgtgctgcaaacattgtttttagtttagactttgcaagtttatatttatgatgtccgtgttgtacattcattcccatgccacagattgttctcatgctgcatccaaagtcccatattgtttgactgatcatatgacatttttattttgttttttttgcatgctctgaaacgaggcatatttttatccagttttacacaataataaaaattgtcatgcttttcaattgtcaaagcttgtttggtatgctgtcccgggagaaagccctgagcttatgagatcctcgagccctgggctccctcttgtttgcagagcggagtttgagctcagataaatcttgatgaactcccccaacttatttctggctaatgacagataggatggttaacggaaaacccacatgagcatggggagaacgagcaaactccgaaccgaaatgtcaactggtttaagaaggattttaaccagagactagggctgtgcaattaatcggaaatctggcttcgatttcgatttttggcttctaacgattttgaaaaaccattaatcgagataaacgattattccagtatataccgccccttttccagttgtactcatttattgctctgcaaagctcagttccacgtaaaaatgactaaaagcatgtactgtaatgtaacttttgcagcacgggttgcgcatccgtcatatttttaaaatcgccaaagagcccatgccgtgtgagtgtaatctaacgccatcttaatgtgagcgctttaatggtaaaatgcacatttgtgtcagagcgcggtgtttagtgattatccatattaaccctcatttgtgtaataaacaaacaagttgagaatcaaaagccacgtgaaagagaaaccatatcagagtcgcactattcttaaagagacagcgcgcaatatccctgctgctgtctgtttttattattaatcaaacaacaaaaggagaaaatcactcactgctcttgactgaaggacttttctagctgaagtttttcttacagtgaagatgcttaaaacacagtttaaacattacagatttaataacttatttcgtttatctttgctatgatgacagtgcattatattttactagatatttttcaagacactactatttagcttaaagttacattcaaaagcttaattagtgtaattaggcaagacattgtataacagtagtttcttctgcagacaatcaaaaatatatattgcttaaggggggtaacaatattgagctattaaaataggtttcaaaatgtttaaacctgcttttaataagccttaattagtggttggtagagtgaggggggattcttcaagatgaagatactgagataagaaaatctggttatttatagcgagttaggaatcatctctttggtgaatcaatcaggagcagatgtgggaccagctgtgaacataaacatgtaatactctcgacattagctaataaataaacttaatttgaagagagataagtttatataatccagtttttattgacaaataagcaatgctcataaaagtattgtggaaaaaagttgagttgttgcttggtccagtgggcatttgcacttgcgtggaacttcaaggacaaaaatacactggtttctttaataatttgttcaaatgtcattctcatcctgtaaatctttacttcagctgttttggatttcattttagttgtttggttgaagtgtaaacatcaaatgcacatctaattaatgtgattttaaaagtatttcattgaaacaggcattagtccatatcaccgtttaaatctgtttattattatatatccttttgatttattaataaactatttatcatattctgctttattgagtagattacacaattctgtccaatctatttaacatctcatagcccaaccttacctttcttatccagggtgcgcagctgaatacacctttcaggtctctctccagctgtattcattgtactctctcaaacagactattcatttgaatcagaataaaccctgctattgtttatgcatgagcagttattattttatcttcaacaagctcacagacgctggctaagacaaagcacatacataatttaaccggatgtgtccttctgtttacatacctgatgtagtgactcattttttccccacacaaatctgtgcttcctcattttatgtaatataaaacaaacaacatttaaactctacttagcgctgtgcattgttatggtttatttttgcagtgctcttgctcactgttttaggtgcgcaacctgatgttgactgtgatggacagacgaggttcaaagtagacgcttgctgcaaaattgcccacttttacatcagctctgcaggagtgcctgtctctaaaccattgattttatctgcaggagtccagctagaaacttgttgttaacggctgctgatgtgaatgttttgcgctcgcgttggttaaagcactttttgtagcggatgaaagcctcagtggactgactgtcttgttctgatgtgtacagatttcctttctgttgcttgtatttcaccattataatggcaaatctaaaagaaaaggagactgattgatggagaaagagtttgctgaatgctttgtggcaggcaatttcgtggcaattaaatgatgtctcaaacagttattttcaaccagggatacgtaaaccccgatgcagttttttaaagcagtttgtgttgtttttatttactgtagtgcaacttaaatcatctttacatgtaagtcaaagctttgcactatgtgaagtttaattataaactaatttcgcgaggatcacagcttatgattgacaaggctggccccgagtcaagctaatgtacgaaacaccaatcagacgattcctaactcactataaataaccaggcatcttactattagtcatcttcgtcttgaagaatccccccttctaccccctctcatcgtctttttcctctatagggcagcacggcgtcccagtggcccagttcttgagatctacctgagctcaaacgcccctctcgccctgcaaacgggagggagccccgggctcgaggatctcatgagctcagggctctctcccgggacagcatgccaaactagcttattaccaatcatcagctaagtgtgaacttttgaagatctttgcagatgccagtgtatttcctatttgctgagcttctccgctatttatattctaccacataagggacttatatttgacttattaaactttccatctggggttttatttattaatagatttaatgatacgtttaggtctttcaaagagaatgtttctctatgaaactggtggttttaggaaggcgcaggaggctgcatcatgagttgttttcttgcaccccaaatagggatgctcataataaccgattaaccgttaactgaaaaggcccattttaactgattaatggtattagttaaattatataaaaaaatattattatatatatttttaaagtttggctgcatcaggggccaaccacgacgaacacgctttttgcgttgagagaggcatctttttaatggttgactaacggccgtgagcattttgcattctttttcattcttcaatcaaatgaaagcagagctggggtttctatttattaaatccatattttctgtgaagtggttgatatgaggtagcctgctatttttatttgatgaaagaaaaaaaggcatatgattggacaaacagcatatacctgttcttaaaaagcattcagtccatgtttttgtctgaattttgacgttttgtcttgatgaaaaatatctagggcaggactatttattttattctttttatttagtttattctgtttttctaatattgcaggtgcttgaagatgtgctgttgttctgatgtactgtatgctgttgttcacatgttaaaataaatcagttttttaaaatgctatatttattgtgtcagacacaaagtagacatgtcaattgtttattttattaaataataatttaatattaatctgaccagtcaaccgttaaaattaaaacgagaggcggttgtctgttggcaaaattaacctgaaagagcatccctaatcccaaattgaaacttccctcaaatattctcacctttaggttgttccaaacacaaataatttttgttaaactctgcaataaaattaaagacatttttgtaaaatcttagagatatttcattcttggaaagcagattaagctaaagcaatttagtcaaacctgtaaattgtgttttatcaaatgaattcaacaatgcacatttctgttattgtacaactaacatatactgatgactactataataacactggtggtaaaatgaataaaatgaacacttgaatattgtgagaattataacagatagatcaaaatgtgtaactggtaatcaaactgtcaagaaataagtattatcaattatttaaaccaaatatgtgaagtatcacacatccaattatggcaatgttaacagttttgactgcaaattaactgctttatttacattcactttttattaaaacagtacatttaagtgtattttagtttaaaatgacatgcaaactagatgtttttttttttatatataattttgggtaaaaagaccttcagtggagggacagaaatcaaataagatttgaataaaaaaaaaaaaatcttcatttgtgttctgaagataaattaaatgctatgagtttaaaacagtattgcggtaagtaaataacgacaattcttttttatcgattttgaagtgaactaaccttttatgataggattaaatgtattcattatttggctactgtatgtttacatgcaatcaaactgactgagcttaatctgaaaaatgttttagttgaatttgaagaagaggtgtagacctgaagtaatccaatcaacagggattcaaaaatacttttgccatgtgcacattgcacaattatgtgtgttgttgtgcctgtgttatgaagtgcagaaggtttgttctgaacatctacagtatatattgcacataccaacatatacttgaattagattaaaatgtttaggatatatatcagatctgcaatcagattaaatttcctcgatttatgaaaataggtgcccgtaagcatagccttttgtataaagcaggggtgtccacactctgtcctggagggccggtatcctgcaaagtttagttcaaaccacaatctgacacaccggggctagctaatcaagctcctactaagctttttagaaacatccttgcaggtgtgttgtggcaagttggagcttaaatcttcaggacaccagccctccaggaccgagtttggatacccctggtataaaggattatatttttctagttttgttttgaagaatataaaggtggagaaatgttctaaaatatgggcctggtaatatgcaaacattgctcattgctcattttctgtgaatgcttatgagtgaaaactgaaatgtatgtcttgcactacacaaatagatcacacataacctataacaaagcaataaaaatgtttaaataatgaatgcttgtcccctaatactttttcatataaaactgtgtattcaagagatcataaagtggctgctgtatcaccacatctgctgtttgcatgaatgcaatacacttactgtatgcatagactataaaatacagtttccaccctttcctattactccttcgtgcatttaacagcataatcatactggagcatagttatttctgggacatgcacacttctcctataagcctccttcatatccattacaaaacctcagctctgtcttttcacattgcatcagcgtctcagacacgaaataggagtcgctttctcattatactgatgggggtttgtctcatcatgaccagcagatctcatttgataagatcattctcttcaatggcccaatgaagcaccaaattgcagcaatctctgtctatagtcagtctaatcttttttttttctttttttttttttggttatctgttcagcttttcagccattttaaagcacatgcttcatgctgccaagaataaatgtttaaatttcacattagatgctgttttgatactagaatggattgtgaacaaatattgcacagatataatgaaacagccaagaaacacacaaatgcagttgccagagtttaaaaaaaagatctgtcaattaacagtttgatgacaatgtaataacagacattgtcagtagctcatgatgtatgggtggctttatacagtatatgtacacttttaaattgcattaaattcaattttgaaaatttaaatctgcaaaagtgacatttatgatacatatatattgtaatgtctcgacagggtacaaacaattttaaaagtgctttttctgtatagcatattatttttaaagaaagggagttcagtccacccctcatgtttaaaagaattaattcattcactcgttttccttcagcttagtccctttattcatctccacaggccgccacagaggaatgaaccgacaacttatcctgcatttgttttacacagcggatgcctttccagctgcaacgcagtactgggaaacagccatacacactcattcacactcatacactatggccaatttagtttattcagttcacccatatctggaggaaacccacgggaacatggggagaacatgcaaactccacacagaattgccaactgactcagctgagactcgaaccagcgacctttttgctgtgaggtgacagtgctaaccactgagcccccatgtcacccaaagaatggattctccaccagaaactcccatcctgataatggcagttattttggggaaaaaaagtattaaaaagtatatagagcagcttctagaaggtactttggggtcaagcacaaagcaaagtctatgttaatagggcaaatcatcagcattcattggtggggcttatgatgatttttcaaattttacttttcatgtagtgtttaatgcaaaagatgtaatgtaatgtaagatttgggtgcatttttagtgattgtttacacaaactgtgtacaaacattagagttcaaagagcttttaacctcctagggcttgagtgtccaaatacatggacagcactttttagctcttaagtggccatcctcttaaggcccaaggtggttgttttttacatgcattgcttatttctctttgctatttgggcttattggaacttatttacaatgaaaatctaagtatcatcctttgatatgatgtactttttgagaaaattatgtccatatgtgtggtacgaatttacataaaacactgtttcctgaatgtttttaatgcatatttaacatagatttttttttacttgctttgactatcagagagtaaaactattttttttccctatttttggcagttatagggttaggcacacatgctgcaaaacagttgcaggatgactgtatgtctgtaacaaaacataaaacattcaaagtattttaaatagaagttactttgcatgataagacccctttgtataatgttcacttctttacagcaagcctcttgctgacaaagtggtttgaaaagatggtgcaaaaagtataacgatttaatatgacaattaatttgagttaaatgtaatatgcctgaagaatgaatagactgtaaatgacaatgaatttgtgtttcttgatgtataatcccagaggtttccaaatacctttcaaaattttagttttatgttcagcagactaattgtggtttgcacagaaaagtttttttgttgttttgatgatgattgaagttaaatgcacattactgtacctatccatgtcaaaatatttaccagaaccacccagcgtgaagttttgtttgtttagaggcactttcaattaaatacggggacaagggaaatgtgaacactcttcttctccagttttaaaagttaataaatctattaatttatctgtgctagccatacataattatttgtttagttgaattttaattggttatttgcaattagcattgctctctccgctaaatttgtgacatcaattgagaacacatggaatcagtttacagacaattaaaataacacgtttggttacttgtttcaaaatagattccaaaacaggctagcattttacatttaaccaacttgtacaatctaaatatttgtaaactgctgtgctttcctacttccccctgccattaacatttgtaaaagatgtcaccctttcttttgaccatttagactaaatggcaaagaaaacggaagattgtatgaggctgtgttaggacttagaagtgaacgaggtcacctagaaaagtgtgagatgtttgaggtgctgcaggagaaagcacacactgtgagaccatatggtctagaaagagaagagcacagaagtaatggccacattaaatcaccccagattgctgcagtaaatcaaaacgagctgttttatttaagcttaattagctgaaaagctctggaagattggcgtcacactggtatccttcaactttatgctttaacgtgttgtattaatgatggaaagtgtcttaatgtggcagtatatgaggcattgctgaggatggaatgtactgtaggcatgaagctaattaagaacaaggagctcaaagaagaagaaacaagaagtgaaaagactaaaaggtgcaggattttcgaaagagacagacaaacaagtaggagagaaaaggagagaggaaaatagcagagcaagtgagcatgagagaaaaaacaccaggaggcttgactgaacaggctgattagcgatgcggtttgatgtcaggaccagtgcacattttgtacctaatagcgagccattgattttcatttcaagagttgagcgttcatgcatctttccattatctgaatcatagacgaaaagaagtgagggggagggagacattgtgtgtcagagcgtgtgatcctttaccattgaataattcactttgcatgcatttcaaaactgaggaggcttttagtttcttagagctgaattgcaagctcaaatcacctcacgccttcaccaacactggtggagagagcttgtctattcacagcttatgtaaaagagagacagtagagccactggtgaggtaaattaaaaaaagtaaaatataattgaggttgatgatgaaacaaggtgcaaatttgtacgtgaacgtcattgtgtttttagattaacgtgggagttatttcagcccaggctcatttatttgaaatacatgcctcagactacatattctttgcaaaatatcaaatacgttgctatcggcatgttttagatgacaaattcattagaggtcgatgtttcgatttttgttaatataaaatagttacttttagggatacatttttgctttgtatttttcagatacagataatttaggcaggatctttcgtccagatcacatagtgaaagcctgtttccactgagtggtacagtatgctacagtacagttcggtacgagtctcctttatcaggcttgttcctctgccaaagggtaccaatgatacctttttggtgggtgtggtgtatgacagaatgtttcagtcgacgtctttcttgcttgaagttaacacatatcgattacacatataagaagcaaatgctttctatacataaatacttatgtataaataaatgtttattaaaaacctttctatgattagaatttgattttatctgcagatcaatgataatatgaaatatccaactgtaatgtctgtgattatataaaataaaataaataaataaaacatttatgaacacaaacagagactaacagtctctataatgttaccaattacaaataaaaaactcccaaaacatacattaaggccttttttttgggttcataaatgatacgaaacatttccattcagtacaaacatcagtacaaacatatcatctttattcttcacctttagcgttagcatcttgttaaaagtaattccatcatttcgagttcataatagtccaaaaggcgaagataataacagtttagataatggcagtttgttcatgttttaggttgctgaaagaatcatttgcttcttttttttcgggcttctcctctgattttcatgcttcactctcacgtttgttcgtttctgaaaggatcagatgtcagaagcacttaaacaatcacgcgcacgttattatcatcagctcaagaagttcgatatatcaaatatagacaacggcgagcgattgcaagccctctagagaaagtgaaactgcttgtgacaatattctgtaaacctatagcgttgagctgcatgtctggctctgccttttggtaccctttcgttgttctaggtcccctttggaaagggcacccaaaaagtggtacggtatggtttactttttggtaccttttgacagtaaaaaagggccataaaagcgtaccgacacgtaccgtaccatataccaccaggctattactacagaccctccagtaaactcaaccaatagtgtttttaagtgcactgctaccatatagtttcaatttcattttacattgctttcatctattttttggaaccgtgctttataaaggtgagacaaatatgttcaattacaaatcttagacataatttagtttgtggtaattatgtggcgttgtgcaaagaactgcacaaaaacaatcctttattcattgataatatgtccctgtaaatatcattagtgtgaaaaattaaaaaaggaaagttgttggcaatttactgcaccgtagcattcattttacctagatgtttttgcgatttaccaaaattgtaagccaaagcatgaagcatcatttgccatgagcccgtgttgctttgtttagagctcatagggtctttgcaatggtgtgttttgacagtcattttaattaaagtggtttaatttgaagctgtctacaataaacttgtcaaagtgaccatagcaaattgatttccccttcacgtcagaagtagtgtgagggctttgagtacatcagaaatagaatggtacttcagtttactgtcaggaagttgttatttggcatcacttcatgctggactgcatctgatgtacagaatcactgaaaacactgggctttgtgatctctgtagcctttaactgttgctccacttgcgtccagcattcaacatcacatttggaagcgtggaagcgtcaatgaactttatttcaatatgtttcagttcacttcagtaaggcaatcttaatattattagatgttttgtgaatagactcctggttggttgacatcactaatcaatagtgtgatacttgctaatactatttttaatccattgcaaacactgctactgttatttaggcataacaaactctaactttttttgggaactcaatattattactaatttcagtattttctgttgtagtgaaaacgccagtcaaaaaacatgtcaatcagtgttactgttgcattcaatgtacattcagtggacttcgtacattcaatggtctttttgtatggtctacattcagtggacagttttttttttataataagcataatattgcgcaagtcaaattctaaaatagtctccatcgaatcctaaatttgtttttatttatgaatttaataactaatttaagagtaatttaattggtagctaacgatacatgattctctccacaatggtcctctccagaaaggtaacatttacctttggaaaaaatgctttctctgccctgtttctttgcattatttcagtttgtgctgtagtgtatcccagaggaaaggaaatagagcaggacagagggaggaatgagaatggactctggtttttccagttatcttcagtgaaatagagtccagtcaaacaagacactgagtgaatctgtaatgctgcagtttctgagctcaaacctcatgacaccaggattgagagtctttttaataaacacagatttaatccacaacctatcctcagaatcaaaatatgaatgtgttaatgagtctgtttgtaataatattgaattataataatagtatgcatttaattgtaatgatatagatcatgtacaatagtgatgtatgagaaaagtaatatcaatctagctcctttacaatatatagatacagatttattccatcaacaggtcctcagaatctaaatatttctttaaaattgtatgcactaacctttattaagactttatggaaatgaacatattgtaaattaagtttggcttcccgtcttaaccatgcgtctaacaaacatgcggtaaatcttatgcttacaaaatgtgttatgctatttttgtccaattaatttgtgtttcctggcttaattagtcatgctgaggaactgtgagctagcggttgagatgaatgcagccttctcacaaaaatatcttttcaaagatttttttccctctcagtttaatcaggaaccggatcaagataatccagaaaaatcccttattctttttacatctgtgagcaaattcactttaatgtcttttatcttaacagccagcaatatttgtaagggtattactaattattgcaaagttcactgcaacttgatgcagatttttgtaataacattctctatagttatttgtggcaatcacttgttttcatttgcaaaaaatagtttgactgatcatttttaggtaatcacagtaggttaaaattattgttatggctgaataatggcagatgtttatgctcttttctctaaatagaataatgaaaacaaacacacacacacacacacacacacacacacacacacacacacacacacacacacacacacacacacacacacacacacacacagcacacacataaaacccctaagttaatcagttcaaatgttacactgaatttaggcttcagagtggatcatcgtactgatcatcatacaggacagcagaaatatgagttctaccaaaaagaccagaaagataaatataatattaaattgcatttatttgataagtattatgtgacaaaagtataattaaagtaaatataacataggatttctttggcggaggccccgttcatagcttgaatcggaacctttttgatccagcaatgactgccgaggatgagggcggagacagagcctacccccctggacaaggccaacctggcgggggtggggagaatagtgggggaacgtctgtgtcagtatctgcaaccaaatgaatggacaacttatatattccttgtgcctagtagctattggttggaactgattgtgatgagcgatgtgacattagggaccctatcatacacccagcgcagtgtggtgcaaggcgcgacgcaatggttgtttgctcgtttcagccttgcgcaagagttgttttgacgttttgcgccacgctgtttaaatagcaaatgcatttgcgctcatatgtgcgcccttaggagttctggtctaaaaatggaggtgtgttgaggtgtgttgctggtgcattgaacaaaccagaccagaaataaaaaaatagaccagaacatgtcgttaattcgacatctcatcaattagaaattatcagacaggaggttttgaatatcagacaatagactttattctccataataaagccgagaaagagcagagcagacctcatagcattctcctcctgctccttctaaactttctgtgtgttttcaaaatctttatacatgtttttatgacacacccctttgtgtctctttttaactcttgaccatttttgaataggttttctagtctaaggggtcctgctattcttggctctcagcccactagctcatgtcaacagagatgttacaggtctatgtcagcaaagtatagatgcaacttatgcaaaggaactaagtgtttacatacattgttatgataggataataacttgataatatgttactcattccaacttctgacacatatagcttcatatatatataatcagtgctttacatattcagttattctacacaatcagtcactcagccttctcctagtgttgcttctgtgcaggcatactcatcttacacagtatttttaacacacgctggcatgtttgctgcaaacactacatacattttgtgaagagaaaattaactgctttacacttagaaaatactactcactgagagaataaaatcttcttcaaacaaagcctgtctattgtccagcgcagagcacattagttgtgcacctcacttacacactgcttaatgcacacaagatgtagagcaatacgcaaatatctttacatatgaaaaagaataaaaatataaaggatagataaaggacatacaaaatattctgtgattcctattcatttatagatcacaaaaaaagaagtttcaagcatttgtagattagaattcgtttaataaaaacataacactttgccagtgtccttcaaaccaggctaaactcatcttttatcagtacgacatatttaataatttttaaaatataataaaattgtgtataatcacttctgtttttacatattcgaatacatactcaggccagaatgagttcatttttacataaatctctgttactctgaatgacaatggaacacctatatttggacaatttatctcataaaatgttatttaaaacctgaaagcagatgctgtgatatatttaccacatttctgatctgtaaccctagatcgatggatgaataaatttgagtttccatatcacaaattgcttttgattctttgttttaagaaggtgtaataaggattgattagaaagctgtcttttatgacctttttaatcctcagggggcataaagcagggaaaaaagaagatctctgctcttcatcttcataattattgctctcttaaaactgcctctcaccttaagtttctaataaacgtactaaaggccataggggagattgtagaggcaagtgagtttaaaaaagctctttaatgagcagcttcatctcctcctgtttattcttcctcatattatgcatcgtctattgaagtgaatatggtttctgctctggtgctgagggatttgaggggaaaaatcctcactgtgcttgcctggactttaccccgagggtattcggctgagaccatgcagcaaagcaaagcagacaattcctgcagctctccatcagcggcttctctctgtaggtttagcctatagacctgttcagcagctgctcaagtgcgatggagatttgaaatgtctcacacacatcctcccttcagtctttcatgtttgacatgacatcacagtttccatgcaggctgaatgacttcgagactctgctgtgttttcatttcttcccttctgtgttataaaatgttgagttgcagtcctctgcatctggtaaatatctctgcctctctagtgcggatcatgtctctcatcgcattaactgctcatactgtgatgagaacccataacgtttagatagacaaatgatcctaatgagttcagaattaaagactgtgggtgtccatgtgttgacagacatttgcttgtgtgttggtgtgtggttaataacagcatcccatcaccagtaaacctcaacaaatatttttctttcattaagtttgacttaaggtacttcccggcgtaagattcatttttgttgtgcactgacaaaaggctgttttaaactctctctctctttttaaatatgatgtatgcgtatattgttagtctattaactggtggaaagtgatgcaagaggtgctagggatagttcactcaaaaactggaaatgttctgttacagtaatttactcgccctcacatcatgcaagatgtagtgacttgatttcttcagattagaagaacatgagggttcttttatatgaaaccttgctgatgcataaaatgcaaggtcttatgaagctagagaatcagtctgtgcaagaaattatacattacactccttttaataatttggcaactgaaatctcttacacatgtacatgatctaaggtaaagtgactatttcttttttcctccgacatgtcctccttttggtacttgcatccatttctaaatgttctatatccagcatttaaatgtatgtgtttttgcatactttataccttacacaatgtgtctgtgaagtttcagcccaaaacacccatcagattatttattatacctttcagaatattggatttttctgctctaaacacaatgtagctaattttgtggcctgtgcctttaaaagtggcacccccagaacattttctcagggatggccagaaataattcagcaagtacatgtgcaaaccaaataaaaatcaataataagtttaaaaacacttttcatataactttttagttatttttcacatacttttattgtacagcatacagtatatgctatgtctaaaactaatgaaaattattgagttaataaaacaaacaattgaacaaactgaacaaaaggcatttctaaatacacacacccaccatacagaccctaataatatcatttatccatattcctttttgagccacaatattattaatgcagctttttctactgatgtaccttaaggtaagtattaaattgccattgctgtcttttgatggtgtgtgcgtgctttcaacgacgatcgggtagggcagttgctccctgggtgaaccaagccatacacccccaccccccttaaattgttagctttgttattcaataaatataacaatttatttatatttattctaaataagtacaattattattaatattattatacaattattattctaaataaataacagaagtcattccttaatgttactggaatacaatgtatcaagtagaggggtatgttaagatcacttaagaaaccttttgcatgaatattaattatgataattctaaagaattgaaatacttagacccgacttttggctaagaattaatgaagtcttagctccatgacactttatccctcctttttgctttatagccatgcttagtgaaagttacatcatcatcatattatataaactttagttgtgtggacttgaaaaactcgctgtgtgccgacacttctgcagaaaaggctgttactccggtttcacgccatttgagcggcacgtattttatcagcgcgcatgcaaacaaccagtttgctttcaccaccgttgtttcggttgcacatagagaactcgtgcaaaagatgccaaatgtaaacacccttaaagtctttattctgggattgccactcgtaaatcatattccaatgcttttactagggtattttttatttatttattttttaccgtctctgcgggctgcccaaagcaagatgccaccctgggcaatcatccatattgcccatgcctaaatccgccactgggggagggtaggggcagtgaatcaggtatgtcagtggcaccaacaataattaagtggctgcattttatttatttatttattgaaatattgggaatttacataagtacaataaaattaataacatcaacagaaaagtcatactttggtggcctaaggtgtggtgagagtttacccacgggtgaccgtggtcttcaatgctagttctccctgcccaccattcccgagtgactgtcatagtgtgcctcaatctccaccttggctgtgtcagataaacagcacagtgacagacatgaagcaggtctcacgtaatgtttgtgagaaaatactacagtaagaatgaagagttttattgtatttatttagagttaattcaggccttttgcaatgagtcacacacaatatcagtacaaagttcacacacacatgttaatacgtggctgttaatcaactcggtgagcggggaaaaacgtcatgttgtggtgggtctcaaaatgggagggatttggatcctattttaacatcatgaaataaaaaaagagacttattgtctttatatcactccaatatgactgtggacacactatacagacagttctgtccaaacagcttacaaaagatgattttcatcataggtgccctttaattatatataaaatgtataggttgtggattaatttggaggatgctcatgacaatatttgccatgccttgttgtgccgccatcattggtcggtcatgtacacatttctaaaagaaattctaatatattttatgttggcataacccttattcatatttctgtgatataatgcgaaaaaattgcaattatttttgctggtgtgacttaatataggaagtttgattacactcaaaaaaatgtaatgaaaaaaagtcaagataacaattatttttatgttgctttaacttattttaatcagctaatcaggtttcaacttttttgtaaattatacaacattttacttaaggtgactagaaagtaatttgattcaacctaaaatattagggcagcaagatttttctagtgtagataaaaatccttaaatcttcttcaactttttcaactaaaaccagttcatgttacctaacaaaccttttttttttgcagtacagtgataattctagcacattttgtcctgcggattcacattatacacacttttttataacctttagtcactttatactgctgccaatcaagtcaagatgttctgcttttgctcattacatgtagcaaaatgtgggtcaagacttttccgtgtaatttgttttccccttacttggagaagagtacctctctgatacactttaaatagcataattaacaactgtgttcagttcagttttgttagcacctttgcgaaaatctaatttgtcggtcgaatgtggctgtcactcttgcaaataaccaaactctgtgtgttgaaaacgagattaagcagaagtgacagtcgtatctacctacatgagttctcggtgactttctttaaccacatgacaacaaatctcattccgctagtcggagcacccaagccggtctctgattgatttggcaagaaaacactgtggccctgcagtctagcagtggagtgctgctgttctccataatcgcagtgagacagaacgcctcagcaggcctcagggcagcccgtttgtctgtatggatcagtgtgccagatgggagtcagtgttctaggatcaggagaagctaatgcatcatcccactgttaagagcctgaaagactcctacagtgtcatagattactgctgttagcttaaatgggaatgcaagtaggccgtccttcagtatgccacatactgtaatatttatgcagtcccttttaaagcttgagatgttgatggcaattgaatggacagattagtgcactaaagtttgagactagattttgtccgttggtcgtaattgagaaagcaggtacatttaaagctgtcattaaatggagtttcagatttttatctgaggtttttttgcaccaaaaatgttattatatatatttttaaaaacagttgtttaaaggtttgcaatgacaaaacagtggtataggtgtctcatgtcacctatgattattgtccatcagctagctgttcaagtcttttgtgaaaggtaaattcacataatatacatccatcaaaaacgtcaatatacattctccaaaaactcccgaagaggaatccagatatgtcataagtctgtttttttttttttttttaagggtaagaaaatggcaatctgattcattgacaaaggaatgttaggaaaggaccacaacaaaagtatacattttcttgtttaataagtataagggtgtaacacagattctagtccatgactaagatgtagaccaattttacaatgaaaacaaaatatagaactggaaatagggccaaaggtttaccaataatcttctgaactagtttgtagatttctttccagtttttcttaatcatgtcacagtaccagaatacgtgcatcacagtaccaacattggatttgcagttaaaacaactttgcaaaacattaggaaatatcttatttagacaaactggtgttaaagaaattctgtaaaatcaattaaaattttgctcgtgctttgatattgtggcacctttgaaaaatatgccagaacagactaaaatccattcttcatcacaattttttttccccacaatctttctcccatgtacctttcaaggagataaacaaaattttttataaaagtagcacttaaactaaaatttgatcatggttaacctcttttaataattcaaaatagacagtaagcaatcatattgtttttgaggaatgttttgtaactgttatattgtatagtattgtaaatattttatgatagccattgatttcatactataatttttctagtcaatagctactgttaacataccaacatagtaaaggtaagtaaatgatgacagaaagcacagttgttagtggttgttagtggttgtcaaaaacaacaccttaattactgtaataatttgtaattatttcctgctgttaataaattacttgatatatcagcattcattgcattgctgataatcgattcagctacagaccttattgtgttttagtttaagattaattgaaagtcttataataagagattttggctgtaaatggacccaatacagagtttataattagctttgaaagatctactaactgtcagattgagcgtattgatttttgtcctggtttgttttgttttccaggcgttccgatggccaattgggagtcaagtggatggcgacgagatgctggagatccaagtgtttaattacagcaaagtcttcactaataggtaggacaactcaatacatttgctgtgaccttaaaaaaagatttcagcctgttaatggactggcttctaatcgtgtaatatttattgacatacttcgatactgcaatgtaatcaatatacaattattacagacttaagaaacatatatagtgaaacacgaccatacagtaagtgcaagtacacttccataagtttacgtgctcaacattcaacctgttttatccaaagcaacaacaatgactattccaatattttgcaatgcagagttcacactgtatgactttagctctgattttcacttgcagacaggttttgtgaaatatacgcacaagcgacaaccacagagtgtaaatattctaagatgtgatctgagagaattgttaatgtgtcaaaagcttgttgtgtgaaaaaagaattctgaaaaacacattggctattacctacagccaataagagagcaagatacaggacagcagggtggttgtggaggagttatagaccacaatctcagaataagctttaccataacactaaacaggagtttgcatgttctcctcgtgttagcatgggtttcctctgcatgcaccattacactgtggcgaccctcattaataagaaactaagctaaaggaaaatgaatgaatgatttcattcattgataacattaaacaaaaacaaagcagaaacctttgcagcagcatgttgcacgattattttttgacaaatgtgaactctgatctcacgtgtggtcttgagtgattaagcaaactttttgcggtcttttgcaagcttgacagagttgtctgcaattatttcaagggcagtaatgcaatgtttatcctcctgtcactgatctatcatgcagtgtgaacacagcatcaactgtatgctaccccagagagtcataccgtgtgaaaataaccgtgattcaaaaactttgaaattcatgcagtgtggcatttgacatgctatggtttgtttattttacagtgagtctttgctaattccatctcaccatacaggacctcgtgaattattcgttcattcattttcttttcggcttagaccctttattaatttggggtcgccacagcggaatgaaccgccaacttatccagtatatgttttacgcagcggatacccttccagtcgcaacccataactgggaaatattcacacacacactcatacactactgtcaatcttagcataccaaataaatctgtaccacatgtctttggaggtgtgggggaaactggagcacctggaggaaacccacgtgaatacagggagaacatgcaaactccacaaagaaatgccaactgacccaggcgaggctcgaaccagcgaccttcttgctgtgaggccaatgtgctacccactgtgccaccgtgtcgcctactcaggtaggctgaggtgttgacacaatgctcaattagtactaatgggcccaaagtatgctaagaaaatatcccccacaccattacaccaccaccaccaacctgaattgttgattcaaggcaggatagatccatactttcatgttgttgacgccaaattttgaccctaccatctgaatgcagcagcagaaagacctgcaacgttttttcaatcttctattgtctgattttgttgagcctgtgtgaattgtagattcagttttctgttctgagctgacaggagtgtcacccggtgtggtcttctgctactgtagctcatccacctcaaggtttgatgtgttgtgcattcagatgctcttctggatacctcagttgtaatgagtggttatttgagttactgttgcctttctattagcttgaactctgacctcaaaccattctctgtaaaccctagagatggttgtgcttaaaaatcccagtagatcagcagtttctgaagtactcagatcagcctgtctgagaccaacaaccatgccacattcaaagtcactgaaataacctttcttccccattttgatgctcaatttgaactgcagcagatcgtcttgaccagttcgttcacaaatctgattaaatgacagtcatgtgatattatactagcattgtctgtgttccagcctcttcacacttcattgtacaacataatgcacatttaagactgtttcagcctagaatgttagatttcaaatatgcagttaatagcctgtcaagagcaactgatgctcctgtgtaaaaaacatacatcttttcagagatcaacaaatccctgaaatacaagtcaaatatcttcatttatttctattctagacatatttatagttaactttattaaattgccaatacattaatgagagagcagttataataaggaggtccaccttattgactcctcttattttctagaatataagagatatattgttatctatatattgtattgagatgcagggctcatgttttattttatttcttctgtactagtacctgtcagtatttgcccggtgaaatgttctcgttttcctgtggttatctgtggctgtgtgtgttttccatctgctgtcttcctccagagtccctggtttcactgacagtcattaccagctgtaaattcagtcctgccaaggtgtgacactcctgctagagcagtcaatgtgcgtgtgtgctgcaagcgtatatacggttaacttccggctgtttcaccagattgcagtagacttttggatgagagattgcagtagcgtaaacatattctctgatgctctcacatgtcagtgaatctaaactgttcctatttaagttgatttccttctcaagcgttctggctgtgtgaacacaactaaagtaaacaaacagccaccaagtatcaaaatttgagtacataatttaagttaattgaattgtggtgtgcaatctatgttttgtgttatcataggcattgtttcgacttcatcttttgtggtctctgtgacacctgtgaatagatcacaatgtatgagaagagcaaccgctgaataattcaaacagcaccatgacatgtgtcacccgtgcagctcattagctatttgtttgttatttacagatgtaatatctatccatcctatgcattacacatttgacctcattgatgggcagcttgtgacatccaggcctttgcaaactctgagcagcaggtgtgagagcgatgtgtcagtccagatcgatgtgtagttcagaaactctatcttcctcatgtcagtctttagggttatgcattagagatggacatttctaagccttggagaggatcagacagtaattgagaattaatggtgatttattgatagctgtggtcgttgtttcatggccaactggccaccaggtggtgacgttgttgatggatctggtgaaattaataggatgtcatcatgcagttaaagtcaatattggaaaaaatcatatggaaaatatcaatagtttggggggttgcttttgctcatgaaagaaattaatattttttatttagatagaatgcttaacactttataataactacacactataaatcatttattaagcaataacaaataggaaattcattatttgttgagcattaactctacattaacagacattaataagcagtttataactgcagatgcaaatgatctgttattgacttataagcacatttaaaatgcgctgaataattgtcctttcatactttgtttattaatttttcactaaattaagtattgcattttttacaaatccttctaaactattcaaatcaacatttataattcttcttattcaggcatctgttaatagttaattgtttctgttaattaaagctttattaactcaacttcatgcagttttgtgacctagaggactatttatgctttataaatacctaataaatgataattcaagagttcacacttagatattgcttgacgactgtaagcaggtttggcatgctgtcccgggagagaaccctgagctcggagatagttgagcccagggctcccgccaggtccatagagcatgtaaggggagtacgagatcaggtggttctcgagagctcccctttttaaagggaggaaaggaggagatagggggtggatggggggtttcttcggaaaacgaaggtaagggagtaatatctagctaggctatttatagtaatttggaatagatctgattggctaactaatgagtgtagattggcggccagctgcggtcaattatatcacgtgctcctctcgaaattagtttaaaaacttcacttcaagagttcacacttagatattgcttgacgactgtaagcaggtttggcatgctgtcccgggagagaaccctgagctcggagatagttgagcccagggctcccgccaggtccatagagcatgtaaggggagtacgagatcaggtggttctcgagagctccccaaatgcatgaagctcgggacagcagccgtgtattcgaagaaactccccaaaaggcttgaaatgctatatccggctgctggatatagttatttgaaaggaaatgtaaagagggctccttggagcaaagggtgacacaggttcctgcgggaacccgagcagagttggcttgggctgtgaatactcctgctggagtagagactcggggagacccctgcgggggtcagagccatggggtgggcgggaatcctgctggagtcattacaagggaaggggagtgaaggactccggctggagaggggggtgaaggggggcagggggggggcggggactccaaaggagtaatttgctcgaggaacactccttgcggagattgagctgggaggtggcagcactatatataattatatatttatatgaaacatatagatatataaatatataatggggtaatctagggcattggggggggcgttttttttttttactgactcttgagagagtcgaagctcttggctctcctgcgggagagagagctgtatgtgccatctccagctggagtcgggaaaaggaatggtcggtgaagccccagctggagggtgaaatggcagttgggcgatgacccctgcgggggtccggtgctcgggattaactccacgggagttagagcgtgagggtgacagcactatatataaatatatatttatatgcgtgggtgcatatatatatacatatatataaataaatttaaaaaataaaagataaatgtgagaaataaacagaaataagtgaataaaagctagggccggggagggtcggtgacatggctagtgtcacagctcggggctgggtgagctatttggctggctccagtaggagtctggaaagatgaggggaaggtgaagactctttctggagggtgacgggcgctataggtgctctgggggtgttcctgcgggaacagagcgtgagggtgacagcactatatataaattcatatttatatgcgtgggtgcatatagatgtgaatttatacaaataaaatcaaacaaagagaaaataaatagtgctatactatatgtcattgaaatgacatataatataaaaagctaaggccgggccgtgagatgattcctgcggtaatcgaagctcggggtaacgcccctgcgggggccagagccatggggggggcggggtcctacagaagttagaaaagttggtgggcagtgaaaacttctgtggcagcggccagggggggcgggggtgacgggggggcttgggcagggaaagaactcttactgtagttgggtgagtgaaaagggggagaaggctgagtgcaaatcagctgaaaggaagaaaagaaattagatggctgggtcatgcccgcgcccttgagagacttggtagttcctctgccctcgggaagctggtatagctgggttgtgttctttccttgtactaggctcgtgtctttggccgctgggataactgcaacggctggtgagggtcctctgggcttccctgagatgactgtggctgagtcggatgtaggttttgaaggcgtcagaagaccaccttcctagtgtttgtatgtgttgttgtgataaccctttgtgtgctgctgtagtggcggctccaattctgaatgagtgactggagtatgattctgatgggaagcctgagttggttaggacatatttaaggtgtttttggaaccaaaagcgtgtcactgggtggtgtgtgtcgtctatgaaaagggggtctaggggacttgcacttagtgttttactgtagtgtgtgtaagctagaagagtttggaatgggcttgtgggggagggaatgttgaatatgtagatgtaatgtccctttctggattgatctgttttactttgcttaatgaggaaagcaattgtttcctcatcaatcaaggtcagatctgctatagtagggtggatagagggatcgaatttagatgtaactgtaaattcagaacatcttagaaatccaaaaaaggcaagaataaacattgcatctagggtatgatctgtatgaaatgaaaaatagcctttcctgattgtggaaatgcatttagctagtatgttgtgtgtgatgggtagccttgtgtctgggaggggggggcgggtcttctgaatgcctttaataagaaggctagtttgtgagttagtgatagattcagaactggagccgtacatgagtttgtgaaaaaactgaatgccacttaaatagctcttaatcgagtttgcctggatatgtttgtgagaatgaaggtaagtgataaatgatgtgattgtaagtagggagaaattggggaatgtagtgttgtatagtgaatggaaatgtttgaatgttttccatgcagtgagataagcttgtaaggttcttggagccaccgcttgcataatgagagatatggatgcttggtgcagatcgtgcatgggatgatttattggaatatcatctctgaataaggagggatgggcgtcgggtgctgctccgcctccggcgctaattctctgaatttctgaaaatgaagacgagagagagagtcagcaatttaattatgaaaaccaggaacatgtacagcagttaaaataaactgttttttggctgaagtccaaataaggcgacggagaagcggcattagagcgggggagtgagagcgccctctattaatgcagtgaacgacggcttcattgtcacagtgaatgagaatgctggaagcagaccattcatctccccataatagggtcgcgacgactatggggtatagttcgaataatgcagatgaatattggtgtgatggaacctctaacatttgggggggccaatcggatgcgaaccagcggccttggtagtaaccgccaaatcctatggagggtgcagcgtctgtataaagatggatgtctacgggggatgaaattaaatcactataaaagaaagaacagccgttccagcacttaaggaaggaaatccagaggctgagttcgtttcggcatggatcggataaggatatattttcttctagactctgaactgatgctgcgagttgaaggaggtgagtgacgaactggcgtccttgaggtatgatgcgcatggcgaaatttaaatgtcctaatattgacagcagttcgcgtttagaacattcttgtttctccaaaaatatggaagatagagaaatgatgcgatcgactttctctttgggtaaagatgcttgaaatttgttagagtccaaattgatgcctaagaattctatgaaggtgctggggccggcggttttttcttcagctagagggatgccgagtttggcaaacactgctttggtaatctctaggtgtttagcaggtggggaatttggaggggaaattatgaggaaatcatctagtaggtggactacgtgcggaatgccgtaattgttagcgaggatccagcataatgcttctgaaagcatgtcgaagattttggggctacttctgcagccgaaggttaaacggactgcaaagtagaattgggatttccaattaatgccaaagagatgccagaactcgggatgcaatggcataattttgaaagctgacgtgatgtctactttcgcgagccaggcgtcgcgtccgacgagtttaattaaagaaatggcttggtctatatcgtggtaattcagagagaattcgtcaggtgaaattatgctgttgacacttgaataggcggaattatggggagaagacaggtcgataattagccgttttttgcccgaaaattttctggtcgctactccaattgggctgactcgataggtgctaaacgggggggggcaagaaagggaccgatcataaatttattatcgatctctttctttattaattgctccaccacttctggttcagcgttagcagattgaaggttaggacatgcgaggttataggaaggaagagtcgaaacaccggggtggaatccattagacagacctgaaatgagaaattcagaaaaattaggatcagggtgcatgcataattcatggtaaagattagaaatattgacaggagtcgacaaataggatctatgttttttatttgctttccacacttggcagaccactcgagcatgagcgccaccgcagtaactgcaaatgtgtaagtatttgcaagggtggcggaaacatctggctgcgttaaagttattgcaagctagagatgatggagggttttgagaggagggaggggggagaagagcagggatagcagaggtggaagggcggggtacgtaactagtggatcttggggtttgtagttctttctcagtggaggggattatgaagggacaggaagtggttgggtgaaggtttgagcggcagaccgcgcaggaaagattgcggcatcctagaaaaactctgttatggagatcagtgtccaaagccccccaataagaacactgattccattgagcaacgcgaatagcgcattttgctgaaaataatttgtgatatgtatagaaatgcgttcccccataggagagtgcgagctccgaaatgatagccatatagtcgttcagctcgcgcctcctatggggaaagacagagcagatggtgtctgtataacgtgagaaagctacgtggaattcggctattgtgagtgtgcgaggttgagagctgactggtgatttaagtgtaatggtgaattcgccgcaatccacctgtcgatctgccgagggaggtgcaataggtgaaaggagtgtagagaggtctatgtctgcacctgataggatgaggttcctgactgtgttggagatctgaggtggttccaggactggagcgttatgcggaatgggaaggggtgtggctgtggctagggtgaagggggctcgtgcggaagatgtgttagtacagaaagcattttgttggggagggttagtaatggaagtgggtgcttggagggatgtagagggaaaaaaggggggattagtagatgaaaaattagcaggcagagggagagcgttggagcttgtaggaaaggattgagtgggaataagttgggttgaagaatgagggagattagaagaaagattgggaataagttgagttgaagaatgagggagattagaagaaagagagaactgaggagggttgagagtcgggggaattgcttgaagagtcggactggagttttcgctggattgtggggctggaggccaaaggaggggggtgggaagtcctggagtggcataattgtccggtggattcactgtgtgttggttggtagaaggtgctttctgtcctgtagcttgaggttgctttttattagttttcttggttgctttcttgggtggtccaggggggtttcttgagtgctgagtagcggagggttgtggatagggggtgtggcgggagcgagttggtctactgtcttggggaggcggagttggtgacgggatggcttcgtacagtttcagaagttcggatttattgcagcgggtggggatggaaattccggcgtttgtgagtgactggcggagttcagaaacagtcattttgttggatgtgatggatgaagatcttgcagaggcgtaggatgaagcgggagacggtaagttgcggtttggagatggagattgcgtgcggcgatgggttcttgtgactgtggagcggatgggtcttcggcctctgataggagcctcggtgtttatttgggtttgttgttgtgtttgggctggtgtttccgggagagctggtgtgttggttccttccatgttgcttgttgatagctttgatgttggattgttctgtttaggttgtgagttctttctgttgttgtcgctgttttgttgtagctgttgttgtagtagctgttgttgttgaagctgttgttgttgaagcgttagctgttattgttgatgtaggctgttgttgctgttgttgttgctgttgttattgctgttgttgttgttgtagctgttgttgtagctgtagctgttgttgtagctgtagctgttgttgtagctgttgttgtagctgttgttgtagctgttgttgtagctgttgttgtagctgttgttgttgtttgttgtcgagggtttcggtagtttgttaggagcagggtttgtccttgttattcggaaaacgaaggtaagggagtaatatctagctaggctatttatagtaatttggaatagatctgattggctaactaatgagtgtagattggcggccagctgcggtcaattatatcacgtgctcctctcgaaattagtttaaaaacttcacttaaaggttcagtatcaaataaacaatacatcgctgcaatcttatctaaaaagttaaattactgtgtcgaataacaggagtgtcaaaatataaaataaaactggataaaacaacactataataatttttacgatacagtatattatgatacaactttttatataatttagtgatgtttaaactgcacagtaattttattttaaattgcaaatatttatttttaatttgatacagattaatttgtgtatcttcaagtgaatagaaatgaataaagtcccttaattcctttttagtatataacttagcctttaactgtcatttataatggatttgtaaagcttaaatagtcctcactttagattaggtcacaaaatgggagaagtggagttattaagcatttattaacataattaactattaatatatgcctgaataattattttattaatcatttacttgcgcattttgaataatccgtaaaaaccagaaacttctcttaaacaacttgtttgcaatacttaatttagtaataaaaaatattaattaacaaagtatgtaggtaaagacattatattggtgcttttaaaaaaaagaggatttgtatctgcagttataaactgcttactaacatctgttaatgtagagttaatgcttaataaataatgaattcactatttgctaatttttacagttttttttctgattacttaagcacaattttgaaattaaggcccattttgtcaaaacaccacacacaatttacacatccacacacacaaacagcagaacacatcagaacttttgcaaaatgaaacacttcatccaaaactttacagcgctaaaacaaaacacaattttgacactgtacagagcacacacgcctcatttaatatgtcacactgtggtaatcaatcttaaacacttgtattatttctaactgactaatactgatataatcaggatttaagaggtattgctataaagtacatgaacatactgtatttaccaatcagggatagactgacagctaaatattccttatgctaacaaaccatacaacaaatgtaaagcctatttattcagccttctggtgatgtatgcatttcattgtaaaaaaaaaatcccatccactgtctcctgtttaccaatcttcctcactttcgtgctttcccttccatactgagacattgccttccatatttattgaacactaatattcaatactactgcaaacatgtttattgaagactaatagtttaaacctattgctttttgttgtggttccagctgatgtggtgtgtacagttttgcagcagtgtgtgtgcacacctgatggctgtgtttaacctatggttcatgtgtttgttcatttgaaggcctttgctttgaaattgcaaggaaataccgttatgaaaattttctatcaaaagcatccaagtgtgtttagtgatttgcatatcactgtgtgtaatgttttgcaaaaagtgtgaagctgacaacgtgcttagagttgtgcaaatctaaccttgtgttttgctccttgattgtacggttttgctaattgtgggaaaagtttaattttagtgtgttagcaatcatgaaaaactgtaacaaatgattcatagtgtgtagttattatagtgttaccgtatacgaaaaagtgacagtaaaaaattgtgttataagtgttttctatttgaagtaaatgctgttcttctttgaaattattattcattcaagatttttgaaaaacagagagcaccaaatatattatgagtatttgccatcacaaaattaattgcattatactgttttatatatgtgtgtgtgtgtgtgtgtgtgtgtgtgtgtgtgtgtgtgtgtgtgtacgtgtgtgtgctacttaaaacaactaactctttgattccctaaatttagacttcaatttcccattatattgtttgtttggcatttgacatcaacacttgactaaaaagtttgccctttttcagtaaactgcttatcagtcaatcttgcaagttttttggggggttttgagaccatgagagtgtgttgaattttcttcagtcatttcattcttttgtatatattccttgaaattgctgtaatgtatcacaatattaggcaaggcacgattatttatatagcacatttcatatacagtggcaattcaaagtgctttacataaacagaaataaaagagacaagtgtaagaaaatagaaacaaataataagatttataaaaataagaataaactagtgttgctgtattatcaaccaaatacatgcagcattgatcagcatataagatatataaaagccttaaaaatatatgaagtttatgtttatcaggagtcttgcatttaattagatgaaatgactgaaagggtgagctgtgccggagagaacagtacaattggattcagcactcatgacaaatgctgcaaatatgcagaaaaacgtcacattccagcttcagcccggctagatattattttactcgctaacgaagtgaaatctcctacttggcagttcctttgtattaaatgcatccctggagttagttttttgtcatgttttcaacagaggagcggctcagtgtccatttcaattatatggtagttactagttatcaagttttgttactagttattgtgaagttaccagccttcacaagagcagtaaataaataaataaatttgcacacatgtatccacacatcacgcatactgtacatgcaatattttgtgtaaggtttgtcaaacatggggaagcaaatagtgtaaaaactaaatattcacaatgaatagtttactcaagtatgttgccaagtaatgtgtattttcaccgtagatatggtttcagccggtttgagttgcttgagaaaacatgaatgaaaatatgtagtaactgaaattttatttgatttgagtcaaatacaatctcatttttacaacacataaatcagcttttttccacttacacaggcaaaacaaaatcaattcctgtgggagtagcaatcgttttaaataaacggacattctatactgtatatagcacgctttacattcttggaaaaaaatatgcaacaggattgtacttttaggggtacaacaatgtcacagggacagtaccctaaaaatctttgtgccttatttaccacaaaatattctgagtagtgctttaaaggcacaatacataataattatttatttaaaatatccaatacccctagaacagtgttatatattttgcttgctcatgtgcttacattgttacattgttcaaattcagagaaatatacaattttaactagttacacggtctgtgacctgtgtcgccattctaataacgtcacacaacctctttttccggtttggattgatagaaaattgggaaacaccaaagatgctttaatatgttgtgcattttaaaagactagtggatgcaaacaatatgtatagatttgtttgtctttttgaattttaaaccattccgcatctatagacatagcaacaagacaaccttaacacattgtgattgcaactgttgaaaatgaaaaaaatgcagggagcaaatgtatgtttttataaaaaatatgaatcgtccttgctcctgatgatacattgatggagtgaaataatcaaagattgaacattactttgaatggcagtcatttatttaaagcatctgatcatctgtgggtttgtggcggcataaacatcttcagacaacagaaagtgcacattcctgttttgcctgtatactgtttgcttgtctgtttttttttgactctcaaaacgctgccagatatttacttatgttttattaatcactaagcccatggtttcagtttttaaaaaaaattaaaaaaggaaataaaggaaaagtaatctagcctatgttatggataagtaaattaaccgcaaattaattatttttcataaactgcttgataaaactgattaggcaggcctgtagccagcctggtgaaaaaggtggttatattttctcaaaatgtgaatcttttaaagttatttacctcattttctatttaattagtgacattttaagaactagttttacctggattagattgtcgggtggtcatcataaccacacgttttaatgaaccaaaatatttcctaaagatttagaataacgaaataaatactgaataatgaataaacacttatttttaaaatacaaatgtattacattagaaaaaaatagaaatccggtaaagttttaaattaaaaactgtactctattgtaatttattaggcaaataacaaactggcctgtgcattcaactttcttcagtcagaatttggtcctttaaataatcaaaaattgaaacattaaaatggtaattttttgtttcagaaataaggtcccagatcaagaatagatgttacttcacatgacttcagattgcatgttttcttgcacagctggctgttggactcatgaaaaataatagttagcatttgccaaaactgattagctgaagtcacaccgatgtgacggtcaacagagcttttcgcttggtcttaaagcctttttcgatgggttattttcacaatttatgatggcatagcaatcaaaaaaggacaaatgagctcatgtaagggacttgtggacttttgtcagtgaggggtgggtgggtctttcgaaccattgcgacatcgatgctaaaacaatatatcgtgcaaacccttacaacttatatcatctctagtatgatatgatcacacacacacacacacacacacacacacacacacacacacacacacacacacacacacacacacacacacacacacacacacacacacacacactgtacacaaacacagatagcaaaaaggactgtgaattctccagttctgacctctccaacaaaagactagtgacttgacaaggcgggacgcagtaaattatggagcagatgaaagtcaattgtctgttgtttgttcagaagatcaataatgtatgtggggcctttagaaaagttgatcgggagccagaacctgatccaggatcagtgaattattcacccgtggacgcatacagttcacagacagtcacaaagccatcatttctccagtgaactgggcacatatcaatcacaattgcctcttatatcgagtccctctggctgaacaatggtgtcatttcacattccagtaaagctgtagctgtagctcagaggcggttcctaaaactgtttgccgttaaaatggattgatgtttttcaacctcacttgactatatggatagactcgcctgccttaagacagtgatgcagtaatagatgagagagcatgggttacctaactacatgtgacatttaattggtcattctagaattcctgatttatttggttcagtgcctgacacagtcttgaattaacaatcagagcaaagacacttcactatctcatatgtctgctgctgatcttcttttaccctgatttgttcgtctatgtgcatctaaactaaagggtagacattatggtcataggtggcgtggtagtgcagtgggtagcgctgtcgccttatagcaagaaggtcgctggttcgagcctcgactggctcagatggcatttctgtgtgaattttgcatgatctcccgttgttcatgtgggtttccttagggtgctttggtttcccccacaagtccaaagacatgcgttataggtgtactgaataagctaaattgtttgtagtttatgtgtgaatgagtgtgtatggatgtttcccagtgatgggttgcagctggaagggtatccgctgcataaaccatatgctggataagttggtggttctttctgctgtggcgacctcaaattaataaagggactaagccaaaacgataatgaaagaatgaataaataacaacagtaataataatgataataataataataataataataatagtaataataagattaataataatgtttcttgatcaccaaatcagcatttctaaacaattacgtggcggtgaagtaacaatgctaaataattaaactttgcctttttaaaacgtgataataataataataataataataataataataataataataataataataataataatatgtagtgcttaatgttgttgtttgagcataaaaagtgtgattattttctttatgagaactgtacatacagtaaactccaacaattgtctccagattttctttaagggactgtgtgtcacaatttcttttgtttttgttttggtttagcagtgttttatcagcatgtttgagagatgctgtttcacatatccatacctgtcaacattgggatgtgaaaataagtaaatagtacattggcagcaagtaaaatagcaaacagttcagcttattaaaattaatagcaattataatgtaatagaatcaagttatcaaatctcattagccatttctctactgtatgacttacacattctgattacagcgtagcgaatgaatgatttatttagatttttttgttgttgattacattaaataacaggtatgtgtcactttaaaaatgcacacatctaacgttataataaaagcattcgattgctttcctaactttttatgctcatttaagacgaaattacttgtgtttaaaaaaaacccaccaagatcaacatctttagatactattattattagttatgtgtatatctgtttaaacacgctccccaaacccagacttttgctccgctataaatcgtgtgtacagaatctctttaggaaacagcgtctatttatcactattgagcttgtcagctgacagtcatgcaccgttatataactgttttgaggattgcatatgaaggggagacggcacttataatgaaaaggaaggtaatcaagcagtttctatgtttatttcaaagtgttttcatgcctaaacaaagcaaaagcataaaacagactcacatttaagagcaaggggcggcccctggtggttcggcagtatgggttgagcatagggaggcttggctctttaatgtttatttgccacccttcagtgaaagactgaaaatacgggagaaatatgggaaatacgggaatcccgggaaaaatggcagggttgacaggtatgcatatctaataaactgatccccagctgttaacattcaaagaaaataaaaaaaaatgatgtgtgtttttatgtacttttgacataaccttaaatggatttgatgtgaaagatgttttttacgctacggggacaggagtttataacgacaagactttagttctttaactggcatcacaattgcccggttggcctcttgcttatagggtatcatttaaacaaaaaaactaaacaaaaatttaagtggtatcagaaacgcaatttaattaaatattagtcaaaaacaaaaaagagttaaagagttaaaattagcttttttgtttatttgttgtagccagcttattcaatgctcaagttggcacctccctcttctggaagaggggttggagaggagcagctcatttgcatttaaagagacacacattgtttaataaatggtctgtgtggtatttttagctgaaagttttgggcacattctgaggccctgtttacacttatgcgttttagtattaaaactgtgttttagatcaaaaatgatccacgtccacactggcatttcacctagtgttcacacttcattgctaaaaacgcaggtcacatgaccacacacacactctggcatgcactgcatcgtatgccccaggcagtcagcaggtgctttgagcacacctccacagatgagaggtgcacgtcagtcagttaaccaattatcttccgctggatggcatctcactatagttgttaaacctgatatttaattgatcttgtctatatctaatgactctttggtcttttgaatctataacttgtttttaggtagtgcgttttggctgagtgcaaagaaagtcaatataataatttatgtaacctcgctgattctgcacaattgactgattgcttgcttttatttcctacattgtataaacgtattgtatgttatacatataatagccattattcattattatttctgatattcagcatataatatcaaaatgaaaataagcagtgccttatatcatgtttttattttattgttaagatagtgaaacaatgcagccagggtgacgtgaatgatgttataaagtccatttgaagatttatctgaagtgtcctcggaagtttgttttccatatcaaacttgtgaagtctgaacttgagcttgaactaagtgcactagcctaatattgaggaaaaagccccaatcagataagcgaatgtctgcagctatgcctctgttttcagaagtctctgtttccctccccatccacactaacatggagcagcaggaaattaaaatcaaaacggcctcttcaaaacacttcatttttagggctcgaaaactctggggttgtgtggacggaaggcctaattgtagcaaaacttaaaaaatggattttaaaactaaaacgtattagtttaaatggggcctaaaacaccatattttttaacaagggaaaaatatttcacatattttcacagtgttgctgtttttcactgggtctttaaagctgtcacaatatatcttcttcacaagaaacacacgacccttacaagctccttgcacattgagccaaaccagcgtgagaggagattgttatttaacaactgtctgactgaacttttttgcgttaacaggttaatcggcacattccgcatggttcttcagaaggtggtggaggagggacacctggaggtgtctgacacactcattgacgacaataacacagccatacaggtgagacacgaggaagtgtgtgtgtgcttgttttgttctgctctgacagtccagaaaagctctttttcacccatacaaaaacatccattcacatacttcaccgcagcgtctagatttgcacaacttgcacagtgaaaagttgttgtcatggttacatgtctacgcagagcctatagggcacgattcagaaaatgttttattctctgtctagcatccactttcctatgcaggttgatgtctatagggcttctgctcatctttttgtgttactgtaagttgagtaactcggacaagaagcacagcacatctttaaaaacctgttttctaagagtgtacgcacatcagtgggaccgtttagtgcagggggtccaaacttggtcctggagggccggtgtcctatatattttagttccaacccgaattaaacacacctaaaccagctaatcaagctctttctaggtaaactagaaacttccaggcaggtgttgaagcaagttggagctaaactatgcaggacaccggctctctaggaccgagtttagacatccctggttttccacagtgcccagctatgactcaggacagtattcaaattccacagagcaccatctgtagttttttattaaattttattaaattcacagggctctattttaaaaatcttaaagctggtccaaatccatttttgctattttaaggattggaaaaatggcattgtgtccagcgcaatctctaaatgggttgtccttattctcttatggctttgaggtgataacgtgtattaaaacaatcagagtttgatcccccattccctttaagggtaagtttgtcatgatcaccagcgatctaaacacaatagattgctgaaaaacatgcacaatcgctaacagactacaaattcgccatttcattgagtacaaccccatacatgcactccgctcacacacacatgttcctgatcctgactgattgcatacacaccaccggaggattgtcaaggactgattacacaccctatttaggcagcacatacctcactctagtcgccaagtcttgtttacattttgtgacattaaaacacgtttcctttgtcttgttttgccatgttttgacccttgccttgtttatctatttgtccctgtctgctgcctaccttctgaccactcacctgttactttgacaacgtttttggattgcctctgtttgcccatgttgaccattgcttgcctgacctttctaataaacctgcatttggatccgcacccctgttgtcagcatcccatcccttgttacaaagttgcagtcatggaactgtttacatggtagactttgtaagcagaaaaaactaaatgctttactggcgaagaaatagatctacttgtttgcgaggttgaagcactaaacccactctctaaataataacaaaaaaaaaaaacttacaccattgtaaaaccagcttcagatttttgccttaaaaatcatactatttgctctattatactaggttagtgtctaattgaacaattgtgctccctaatactgttaatatactataaaccagtgtgctgttgatatgagacatttattaattcattcattttccttcgtcttagtcccttatttatcaggggtcgccacagtggaatgaaccgctaactattccagcacatgttttatgcagttgatgcccttctagccacaacccattaatggaaaacaccattacaatctcacattcatacacgcactcatacactatggccaatttagttcatccaattcacctttagtgcatgtgtttggactgtgggggaaacctggaggaaatccacttgaacatggggagaacatgcaaacagaaatgccaactggcccgaacgaggctcaaaccagcgaccttgttgtgaggtaacagtgctgaccactgagccactgtccagcccagctttacatttgcctttatttattaaagcaggggtcatatctactgtaaagcctcagcagggctcaagttctccttttagtaagacatgtaccctgagaagtgaccatcagccagttgacagaataggctggactaaggttaaattgttccttgttccttctaatgagattgtatatgtgagaaggaaagagtaaccgatgcgttcagactgatactgccacatggttagcatgaccctaaccttaacacttactgtaactcacttacaactcacatacacctaaccctaaaccttatccttctacctttcctcagctttcttttgcttgtgaagcttaagtattaagtaaatacttaagtaaatgtattcacagtaacttttacaacattatcctgaacattgttagcattacagttttttttctgattgcttgagcacaattttgaaattaaggctcattttgtcaaaacatcacacacaatttacacatccacacacacaaacagcagaacactcaggacttttgcaaaatgaaacacttcatccaaaactttacaacactataacaaaacacaattttgacaccgtacagaacacacacgcctcattctatataaatctgttttcttgtatcatttttaactgactaatactgatataatgagtatttgagaggtattgctataaagtacatcaacatactgtattcaacaaacagtgatagactgacagctaaatattgtcctattctaacaaaccatgcaacaatgtaaagcttacttattcagctttctggtgatgtatacatttcaatgtaaaaaaaaaaaaaaatccatccaatgtctcctgtttaccaatcttcctcactatcgtgcttcctcttccatactgcaacattggcttatttattgaagattaatatttatagctcctataaaacaaattcattgaagactactatttaaacctatacttctgtaaacatgttataacaatagtttatacctattgctgtttttaaaacccaggctcattctacaacctagtcccacggatgattcaatcgactgcgaaatacgtctgggtaggtacgtatttgtgcagtttttgttttcgcgaataatatattttcgcgaataacaatatattgtttttgtgtacgctttttccgcttctcgaacatctcttgcaagcgcccacgctgttctcacataaagccaccggaggccgctgtcgagtgaccgtttatctggctgactgactgaatgattgactgggcgaccggccaattagccgacccaccctcctcttccttacctaaacccaaccggttttaccaattggtaaaatcgcttcgcttaaaaaaattaaatgcagccatttgttcctccgattacttaaatcgcgttcttcagaaacgtccccaggattacgttttcagaatgagattgtgttgttttttttatggtggttccagctgattggtgtgtctacagttttgcagcagtgtgtgtgcacacctgatggctgtgtttaacctatggttcgtgtgtgggttcatttgaaggcttttgctttgaacttgcaaggaaataccatcatgaaaaatatctgtgtcaaaagcatccaagtgtgtttagtgatttgcatatcactgtgtgtaatgttttgcaaaaggtgtgaagctaacaatgtgcttacagttgtgcaaatctagccttgtgttttgctccttaagtgtacggtttggctaattgtgggaaaaagtttaattttagtgtgttagcaatcatgaatactgtaatgtcatgggtcaaaaaacaaagctaggctcttgagagcaactgcaaacatcaaattcattttattttctgtgcaaagaagttttgtttttaactattgtttcaagctgtgttcacattttgccaacaaagcaattaaaacaagtaagaaattcacaatgcctcgttacagttttttccaattgtttacacacaattacttgtacttcagacacaatgactacaacatataactgatgcaccaaccccctgaaccaaatactccattcctcaaacctattgaggatttatttttctgcttggagatgtaaagtgtatgaccgaaatccccacaaacgtataccccttctccaagctctagcagttgatgcttttcgtgactggatttgccatgcaaagtgacatttcccccactgcttggccagaccaaaacagaaaagaggatgcagtatagctgttttttattttttatttttactgtaactgaattcagtaaatacttctagtgatggtatatgtagaccacgatatctgcaaccttgtgttggttggcatgaacactgtgtacacagtttttgtggggaaaatacagtaaactatatttggtatttgattgttttgtataaaaacaatattctgaaatattttacaatacacttctgtaggcctatgtactgtctgtagtaagtgtaagtctgagcaaaaaaaggcttacagaaagtcattatgatgaatggagaaaaagtggtcatggtgttttacattaagcacatcagtgttcaactgatcttatgaatgtctattcatgtgatggtttgtgtgtgtcatttgaaaacaaaagaccattttgagaagaaatcaaattgttttgaacgtagagtttcattttgcagaagaattgaagagttttgcccaatatgtgtgtgtgtgttttgtgatttgtgtgtagagttctgacaatatgagacatattttcagaaaatgtgtgtaaacatttggaaaaaactgtaatacgatttatagtatataatatttatattaataaaaggtattctgccttttaaataatggaacaattatatgcattgatctgtatctcattaataataatgatatttataaaattagcaagtttataatagtaaaatttgaacatcgagggttcatagcattgtgaatgcatgatagttaccagcagtgatgcagggaatatttagttgccagtctgaaactaacagctcactgtttaagtgttcaaaggacacttttcttgtaaaaacagatgtttgtatacacttaaagtcgaaattggattcatagtatgtattttgacagatctgtatgcctgcaaatggaagctgttgcatcctgcaaataataataataataataattccttaaatttataaagcgcttttctggacactcaaagcactttacacattttttgggggggaatctcctcatccatcaccagtgtgcagcatccacctggatggcgtgacggcagccatattgtgccatattgcaccaggatttttaatgaacacagagggtcaggaccttggtttaatgtcttatctgaaagatgtcgctcactgagcagtatagagtccccatcaatatactggggcgttaggacccacacagactgcaggttgagcgccccttgctggtctcactaacaccacttctggcagcaacctagctttcctaagtggtctcttgtctaggaactgaccgggcacagccctgcttagctttagtcggtggtcatgtgagagtagcagagagctagctgccggctaaatatgtccccatttagcaaaattcataattttatatcaatattaggccatctttgagaaatgcatgtctgttgaagtagcccatcagagattactgttggtcagaatcaatcattattataagcatacacaaactactgaaaaaagcagagcagtggaatttcaatgctagcgataatgaaaatgtagacactctctccaattaaatactctgtgatggcatcatcgttgtttgagtttgaagtgttgtaagttcggggctcagctgggatgttttgaagatcccttttagatgtcattgttgaaggtcttttaggttcctttagtgaaaccagtctctccttcacctttgtctggtaatcttgtctccaccaatagtcgccagacctgaagtttgacattataaaaacagatggttttgatctaatatacagtgatttgattatacatacatggggcagttgtaggataatgattagagttgaacttaaaatccaaagagactgatggtgaggggagcgctgtaaaaattattgcgccaatttgttattacaacctaatattttggggtgaatgtgttggcatacttaaagttttacctgacttaacttattagaattttaaaaaagcagctaaactcatatacagttgaagttagaattattagcccccttttgatttttttttatattttgcaaatgatgtttaacagagcaaggaaatgttcacagtataagtctgataatagtttttcttttggtgaaagtcttattttctttattttggctcgaataatatcagttattaatttttaaacaccattttaaggacaaaattgttagcccctttaagcaattttttttgactgtttacagaacaaaccatcattatacaataacttgactaattaccctaacctgcctagttaacataattaacctagttaagcctttaaatgtcactttaagctgtatagaagtgtcttgaacaatatctagtaaaatattatttactgtcatcatgacaaagataaaataaatcagttattagagatgagttattaaaactattatgtttagaaatgtgttgtaaaaagcttctctcagttaaacagaaattgggaaaagatttacagggggtctattaaatgagggggctaataattctgacttcaactgtatattagttaactgcttcaaaacattaacatttaaatagtacagatatgtgcaaatgaaaacaaatatattgttattgaaataaatacacttaaatgcatttgtatagaattttaacaaaaacaaagtgtgtgtgtgtgtgtgtgtgtgtgtgtgtgtgtgtgtgtgtgtgtgtgtgtgtgtgtgtgtgtgtgtgtgtgtgtactaaaacgtacttgttttaggattatttttgtttggacagttacagctggaaacattcaagcattttcaactattcatcattcaactattatgtttgtttttctttttcattcttttataacccggttgaacacattttaatctggttttatctgttttagtcatttttacttttttaatcatttctattttcttgtttcttttattctgcttttatgtaaagcactttgaaatacaattgtgtatgaaatgtgttatgtaaataaacttgccttgccttgccttgccttgccttgtatctggctacactgaccaccattttctcattgtaatattgtggtgtgtgtttgtctgaggttcttctcagatacctgcttgttgggtaaaatttgaatttgcagacttcaggggctcggtggttagcactgttgcctcacagcaagaaagtttgcatgttgaacaccaagtttgttctccccgtgttcatgtgggtttccctttgggtgctgtggtttccccaaaaggcatgtgatagaaacagggtttaatttgggccggaacaagtctcaaacttctgaagtctgattcagcatctaattttactgatcctcctccccggcccactcttaactttcttccgagactcttcaacactctttactttcgtccgcccccgccactgttcgatttctgttaccttgatctattccaggacctcgcaattcacaaattaagcactgagtagcagtgaattgaataaacaaaattggctatagtgtaagcgtttgtgtgaatgaggcagttaacatgagttaagacaacttcagtatttaagttcattaaacttaaaacatgtccattacacttgaattataaagtcctgtcaactttaagacaaacatacaattttaaggcagcacgaacacttacatttttaagttgaaacaacaacaaaaaaatgtacaatgagtgaatgaacagagctttctttcaccttcaataatttgaagaatttgatgatttttttcaggaaacttatactaaaaggattttcaagaacccagaagtgattcttctacagaaataattgccaaagacattcctggagacccctaacttcttaatgggtgtgccttccaaaatgtacagtgtacaaaaattaatattaattggtatatattcttaaacataggctcattttgaaaacgtagccctatatacatttctggaaattgcgatttatgtagccagaaaagcaaatgactgcatttcatctttaaaatgaacgatacgttccttttagcgcttattagctgactgcttacctttgtattgattgctttcccgctgctaccagtttggccagttgcttgccatgtacgtcgggagatgcagagaggagttgaccacgacggcggcattcgagtgcgtcgaagaacggttacagaaagcaggttacacaaaaatagaagccaaaaaagttaaataaacaagtaaataacaggatgagaatgtggtcaaatctgaaaacaaggtaaaaatcaggcaaggacttttcgtttttttggattgctttttataactgtcggttgggtttagggaagtgggtggtcgggtcaacctgtacttttgacaacaatattggtcagatttagggaaggaggagggtgggtcagttgatcggtcagtcagtcattcagtcagtcattcagttgacagcagcctctggtggatttacgtgagaattgcaggcacgaatggcactcgagagagatcttaaaaagctcacacagtggcctctggtagattcacaaaaacaaaaactgtaaaaaataaaacatagcttctgtgacatatttgtcacaaccagcgatcgcttcccagaggatcgctggttctcacacgaacttgaaactacatttccgcatttcccaggactacattttcacacatgcactgctcccaaacacgcacacctgctcactcatgtttcctgattgcttcaccagctggaccttgttcacagactgattacatcccattcataagccactctctcacactaccagttggccgagtcttgttttccttgtgtaacattacaacgcgtttccctgtcttgtttctccgtgtctcgataccagccttgtacctttgttatcctgtttagccgcctgcctttcgacctttagcctgtttaacgtttatgattctggactgcctgtatatacctgtttgcacctgatgaccattgcttgcctgacgtttgaataaactgcatagtggatcttacctcctgtggtctcctgtcactccaccccagtcgtggttacagaagactcggccagaacatggatccagcgggtgttcaaatcatgcgtctccgtcaggaagcccggtcaatagaggagtacgtggaggactttattaatctggcccaccgtaccaccctgagtgaggtatgcctcatgattttctttcatggcggactgtctgagcccctatactccaacatacccctgtacggaccccagtggtctttggtgaactatattgatctagccctgcagatgagtggatcttccttcaccataggagaagtggacgaaaatcctaataatcttttggggggggggggctgtagagagcaagacccgctggctacggggcttgcgacccattgtcctcagctagctcacaagatggccgctcccagtcagccagctcacaagatggcttccagttcaaagtctgttcctgctcctgaaaggccatctccagagctgccagatcctccagtgctgccagatcctccagagctaccagaccctccagtgctgccagaccctccagtgctgccagaccgtccagtgctgccagaccctccagtgctgccagaccctccagtgctgtcagaccgtccagtgctgccagaccgtccagtgctgccagaccgtccagtgctgccagaccgtcctgtgctgccagaccgtccagagctgccagatcgtccagtgctgccagatcctctagagctgccaccgccagagctgccaccatcagagctgccaacgccagagctgccaccgccagagctgccagagccgacgccgcagccaacgcctcagccagagctgacgccgcagccagcgcctcagccagagcctacgccgcagccagcgcctcagccagagccgacgtcgcagccaacgcctcagccagagccgacgccaccgccagcgcctcagccagagccgaccccgccgcctgagcttcccgagtggtcgccgccgccgcctgagcttcccgagtggtcgccgccgccgcctgagcttcccgagtggccgcggtcgctgcctgagcttcccgagtgtccgccgctgcctgagctacccaaacggccacagctcctcgccctgtcggctccctacaagcctccaactctgccggctcctcgcagcactccaggtccttcgctgccacacgatccaggaccactgcagctccactctccgggtcttccgcagctccagtttccaggccctccgcagctccacgccccaggtacgccccagctgcatggtcctggccctccaaccctccccctgttccgcctccgctacgcctcccgcctgaacagtagtggagtgtctggaatccactcctagagggggggctatgtcacaaccagcgatcgcttcccagaggatcgctggttctcacacgaacttgaaactacatttccgcatttcccaggactacattttcacacatgcactgctcccaaacacgcacacctgctcactcatgtttcctgattgcttcaccagctggaccttgttcacagactgattacatcccattcataagccactctctcacactaccagttggccgagtcttgttttccttgtgtaacattacaacgcgtttccctgtcttgtttctatgtgtctcgataccagccttgtacctttgttatcctgtttagccgcctgcctttcgacctttagcctgtttaacgtttatgattctggactgcctgtatatacctgtttgcacctgatgaccattgcttgcctgacgtttgaataaactgcatagtggatcttacctcctgtggtctcctgtcactccaccccagtcgtggttacagtatttaacgctctcaagaaatgtttatagcgctacgttttcagaatgagcctgggttgttattcttttacagtactctagccaaaactgctcatatttatcctaaattattcacttacaagcttttaaacacttatggcactaccatgcacaagacactaggcatgacgcaagtgtttttttgtcactagcaatgtgttatttaaccagtgttgtttaaattgctaatgcatttgcatttgaccattgcccaaccaaaagctggtctaaaatcatgcttactgtacagtatgtgtgcattctatacatgtcagacactgtatatttattccacaaagcaaaatgttgtgatgttgttttttttgtatcttttgggacatatgcagttatacaatgctctttccttgaagcagattgctgtaaacatgttggataatgtgcaattgtgtcattaggcttctttgtaaaatgaacaaatagttacctaaatgtaaccaatctatttaaaattacagatatgtaaaataaaaaacctataacattacaaatagcctcataataatagtgataatcacatttttacaaccctgtggtgacaaattctaggtattcattaccactctagacaaggcttagaggatcataatgtaaaaatgaataatgaaggacaaacaaagaataataaaaaaaattatgtgatttttatttatttatttttttattccagctcaatgtgaagctattcctctgcctaaagtgagtgccacagtttttttgttgttatttcaggagcaagttaatttggtctacacattgcatattacacaagcaggaatacagcaaagctctaaaatattgttaaatatgaaatattaaagaaataaaatgtaaaagattattattgtctatataaaaataaaaaagctacctcctcctatgcacgccttcttcccttcagtggattttgatggaatctggttcgttctgtagatggtctgctcgcgcactttaacctcaggcacatgcagatccatgccatggcacaattgcaacttgctcataaagggaatgggatgagatgagactctgattagtttaatgcatgttacaccaaaaacacacccttgactaataaagagtttaaggacctctcttttagaccatgcactgacgaccaatttccctgaccttaaaaaagcaaaagtgggtttggacaccattaaatagatctaataaactttacacaaattgccattattacttgttatttattgttgttattgttatttttggctagttgctagtgagattctgaatgttgttattatggttagctaaaaacttaattgtttggaggtactaaaataacaaactaccaaagaaataattattactaaaaacacatacaaacaagtaaatctttaatttaaaaaaatgaaaaataaaaaaatgaactgatattgattataacctagtaataacatataataatagtaaaaaaataaaatactcctaatacatgaataaaaactacagtagtatatagattatgttaaaatctacttccattaaaatgtaaaattcatgcaaatgtggtgaatctcatcaaaacattcaggacaacagactacagtacctgctttctacgaatttcagtcttttaataatcacataatgctgtgttgtggttagcatatatttaaattaattgtgcaacttcttgtgcatctattttaaaccatttttaagatattctttaagaaagttcaccattcacattttttcctaagttgcatgtgaagctctgttggcttttcagctaatctttacacaataaaacataaacaatacacattatacagcaaaataaaattcaagcttaaaaaatctaaacaaagctgttaatttatttttattaagtctttttagctgtccaaagaaacctgggcctaccttcacttgtctttgtcctgatgatgtgctatagtgttgaccaaaaaccttgttttctgatgataactaatcaacacatgatgaaggtttctctctgactcgagacgtgtttagtaaagcctttttgtccatttttaaccacaaatttgttgccacagttattgccactccttcacccattaagtagatggtatgaagtggaaatcaaagtgctttattgccaatccctttttaaaactgcttccttttcccatcatttatataatgatcttctcaaaaaaaaaaaaaaaatgtttaagcctgtggttatgttcacattttgccaactaagcaattaaaacaagtaagcattatataactaaaggcaatgtgtacaagttacattattaataagaattatatatattatatattaattatatattaactaaatggtgtctgccctttaagtaacagaaaaatcatatacattgatgtttatcttaaataataataacgataattaaaaaaatatcaagtttctaaaagtatatatatttgaacatcaagggttcataccatcgtgaatgcatgatatcgaccagcagtgatgcagaaaaatagtcagttgactgtctgaacagactgtctgttagacactaagtgtttaaaagacacttttggatttacagtatgtattttgggtgtcactgtggcgcagtgggtagcagctgggtcagttggcattgctgtgaggagttggcaagttctccccgtgttggtgtgggtttctactgggtgctctgctttccccccacagtccaaagacctgtggtataggtgaattgggtgagctaaattgtctgttgtatatgtgtgtgaatgagtgtgtgtgtatgctcagttaaagtacttgggttaaaaatacctctacatacagtataacccaactatacgttattataccaccctcccaacaatgggttattttaacccaatgcattgtgttgtataatttaacccaatgtattttttttttttttatttaatgttttttttttccattctggtattacttttgctactagtactagtattcattttataattaggactgtgtaaataaaaaaacatatttccaatacattttaagttccagatacttaagcgtttttattcgtttaatattgatcggctatgaagcgcttatttgtatcattaatcattaagagtccaggtgaaacctatagactgcaaaagatatagatgttgtatccatgatgccatagaacgcaaaagaagctacaagtaggcgtggccaacagttgccattttgttcgagcatcatcgcaccaaccggggaataccaaacaagggcaaggagcgggaggattagcggagctacagacgcctgctagcattttgcttagacaggcttttctgtgggagaaatgcttaatacttgattgcctgccacttgtttgtgttctgaccacacacatgcttggttgtgtactatattaataaagtgtttaatcttttaaaaaacactgttgtaatacattgagccactaaacattgttcttatgacatttttctacaggaggaaaatgcaaattaattccaaacactttaaatatagtctgtattagtaaatgcaaggatatttatgaaatccaggcaaaacactgcatgacaacgtttcagatgactgttctataacctacagctaaccaatctgtcagattctggagtgcattacaggtctaaagaaaaatataaatgataaatgattttaaataaaacaaatacatttatagatatgatatacaagtatattcactcagctgggaaattgaggctaggtgaatggtttgtaagcacaattaagtgcacacagcatgccatattatctgatgattgtaagaaataattccaaaaggcaactgagtaaagccacataaaacaaaacaaaaataggatgtacatgccaggttaagcggctaatcagccgaaatcagctgagatgaagtgatggtgaccagtgagactgttgctgtcactcaagtggtcctgccccgaaattatgcagacctgataaaacttaatataaaggaaacggatgagttataaaaaaaatcactctcatcacagttgtcatgaagggtaatattagctatatacaccaaaattgttctttgtaccaggctgtacataccttttttctgctgtatgttggccgttttaacagtgggctcaatagaaatttgctctgttatggaaccaggactaggcgaggcagtggcgcagtaggtagtgctgtcacctcacagcaagaaggtcgctggttcgaacctcggctcagttggcgcttctatgtggagtttgcatgttctccctgccttcgcgtggggggtttcctccgggtgctccgttatcccccacagtccaaagacatgtggtacaggtgaattgggtagactaaattgtccgtagtgtatgagtgtgtgtgtgtggatgtttcccagagatgggttgcggctggaagggcatccgctgcgtaaaaacttgctggataagttggcggttcattccgctgtggcgaccccggattaataaagggactaagccgacaagaaaatgaatgaatgaatggaaccaggactagcggaatttcgatgaattgcagtttcagttatttccttatttgcttcacgagggaaagcgggaggttgccgcttaagtaaaacgattattaaaaaaacaacacggagagttaatttgatgaaaaaatggcaatgttactgggtttgagcttaaataaactttaaaacgcaaaaacaacattatatacacataataaaacaactgttcagtcagttaaatcagttgacctagctggttgggttattaaataaataacccaataaaggttaaaaataacccaacaaagcaccaaatatttaaagagcccatattatacatgaaatagggtcatatcctggttgtaagggtctccaacaacagtctaatatgcatgcaaggtcaaaaaacactttcatggtcttataatctgcatttatttttacctaattatcccagcgactcctgtatgaatcgtccagtgattcatttgttcccaaacccctccttagcgcggagctaatctgcgctgattggaccgatgacagtctgtcgcgattggtcgactgccttcagtcagagagggaaatggccaatagctaatcagcaatttaaaaagtaatcacagttcatacacgctcgatagtgcagacgtggattttagctgccacactatggcgagtggatagtgccacggataaccgaacgaaggagacagtcgtgtactggccataccacacacacacaaaaacacacacacacctccggatgacaacgctcccgcttccgcccgcacccgccaggttttagcctgagaacccgctccgttttctgcccgccgcgcccggtcccgctagagcggagaacacaaccaaaaatcacccagtatacagtccagacagccaagctgtcgttcgttcgttcgctcgctctctctctctctctctctctctctctctctctctctctctcatacgcgcgcgtgcgcactaacacacacacaagcaccacgcagactctctctttctaattcgcatagcaatatccgtgatattgctagacagcccgctcccgtcccaaattaaacccgttaccgaccgctcccgcgatttattcggaaatttattcccgcggctgtccccgcgccagatttctgcggcgcgggaataaatttccgaataaatcgcgggagcagaactctagcacggagctccataaacaaacagcacgcgtcgcgtttttaacgtgactttgcacgcgataagataaaatatccagttaacctgatacagtacacgcggttacaagtaacaaatcacaactaaatacatttgcaagctagagtcaacgaggcaacaactttaaccgcacgtacttacacttgagaaatggaagaaacccatcctgatgtccatcagtaagttactgatccttcctttaacaaacgcagatgaagtattctttgtagcatgtagcttccagaagtttccagtagtttccaactgcttggctataatgctgaggtttcatctttgggtagagactcaatatatccatctgcaatgtgacttcaatcgaccggcatgtttgtgtgcgtgtgtttgtgggtgtgtgtgtgtgtgtgtgtctgggttactgcgtcagagggcggggcctcaggtttgaaatctcccgggtttgcgcgtgcacgtgaaaaactttgtttcgttcgtacgtcatggcgaaacacctaatgagtcggtatcaaggcgactcgtttgaagcactatgaatcgactcttttatagatgaatcaacagttttaaacactgtattcttacagatttaagccttagctggatacttcacttcacttagagctgtgttacacactacatggaggggaattttcaaaaacccataatatgggctctttaaccaaacgtctagaatttttaataaataactcaataaagattaaaaataactcaacaaagcaccaattatattttaactcactcatttggttgaataaataacacaacatttttttagagtgtggatgtttcccagtaatgggttgtagctggaagggcatccgctttgtataacatatgctgaataagttggtggttcattccgctgtggcgaccccagattaataaagggaccacctttaggccgcctttgtaacttgaaaaagttattatcacttcacagtctctttctgaaaattcattcccagcatatggaatcactggtaaatcacttttggctggataataataaatagacatttttaagtgtaatgtctattgctgactgatatgccataaatcataaatatttaatatttgcagctatactgactaagtctgggagaaaagaaagaagatgtttaaatcgtttttatttctctgttaaattctctctataacatccatttgttcaatttccaagtattataattatgctgacataatgatgaatttttcaaaccattttacaaagcacaataatagaaacacatttacagaacatgcatcttttcatttactgagtcacgctacacaatatactgtatgtcttgagcacattctgtaatgagctatttggagatcaatgaaacattagtgaatgaagcgctgcacattcatgaacatgttactgaatctttcacatgcggtcactctgtacatcagtagatatcgtgtgttgtgtttccttcctggtttctcttgattttggagcagcagtgaggcgtcctgatgatgttttctgcatcactcctcatgaacacatacaacaaacagtcaaccagcgggtttaacaaataaagtaatatggtgaaatctgccagactcactttagaattatccacattattgtgataaaaaaacataatattaacaggcatagttagaaacgtgtaactcatcagcacaaagaacagaggagccagaactagctgcttctttataggagtgagagatggtgactgagaaagagatctgcatgcacccacaaaacatgcaatgatcactgcgtacaagatgaatgataggaggagcgtgccatatgtcatgatttctgcagccccaaatacaaaatttaaacctggtagaagccaacaggtgagtgaagtacatataagacatttgatggaccgatgagacctgtgccaaataggatgagcgatcataacgtatctttctattgctatgcaggtcataaaataaaaacttgcccaagctacaaaaaacatgatggcaataaaaatggagaacatccaattggaacaaaaggtaaagagtaaggtcgtaacagcttgtatgagatctaaaatgagcagatttatgacaaaaactggtgtggcctgcttagatttgatgagagtgtaaacagcaaaaatagccaaggagagcagtggaatttcaatgcaagagataatgtaaacatagacaatctctccaattaagaaatctgtattaatgtcagtgttgtttgggttggaagagttggaaattttgctctcagctgtgatgttgtgaagatcacttttagatgtcattgttggaggtctttgaggttccttctgtgacaccagtttctccttcacctttgtcttgtaatcttgtctccaatagtcgccagacctgcagtttgacattataaaaacagatagttttgacctaatatatagtgatttaattatacatacatggggcagttgtgcatgggataatgattatagaggtgaacttgaaattccaagataatgaattgaatttttttccatattcaatagccaaaacctgtgctttaagcaatggctgatctgggtgtgtgtgttcccactcctcactaatgaacaataattcatgattttttcaggaaacctattcttaaaggattttcaagaaccaagaagtggttcttctacagaaattattcgcaaacacattcctggagaccactgaaccttttgcttgtctccttcatcaagctgtatctttttggatgtaagcagtaatacagtgctctgttttacagtaaatatcatgtaaacatgctaagtcattaagctataacaaatagttatatataaatgtaactaatctattttgagtccttaaagctcataattaataatgaaaatgggaatgaagtcaaaagttattattattttaaagcatacctgccaacacttctgtttttttatttctcccggaaacctcctgtaattcccccccttcatcaactctttcgtacagtctataaaacccccggatcgctgactttggtatagtattcgatcgaatcggctgcccgaaacccagtgcatagtacagttacttaggtgtgttatttagacacctcactgcgacacctagacatcacccctctcctccctcgatctgccatattttcagagacaaattttggccgggatgttttaaagtaataaattaaattacagataattgcagcctaataataacaaccccgtccagaggttgcagaatataggcattcattaccattctagactaggcttagaagatcaaaaatcaaaacttaaagtgtatcaccgaaaaacgaagtacaagaaaaaaatattaaaaaatgtgatgctgttttaaaattccagcttaaatgtcaagctatgcctaaaatcagtggtacagtttttttattgttgttatttcaagagcaagttagtcatcggctggtgcaaaacacacctacactttggatattacacacacagtagcacagaaatatcatcaaaaattatatattaaaggattaaaatgtacaaaagtattacatgtacctcttctcatgtacgcattcttcccctcaggagattctgatggaatccgactcgttctaaaaattgtctgcttgcacactttaacctcatgcaggagcagatccgttttcttgctactgacacaatcagttgttctgcttacgaagttcgccatgtaaatagtaaatctgccatggcacaactgcaactcgctcaaaaagggaatgggatgagatgagactctgattagttcaatgcacgttacacccaaaacacacccataactcattaagagtgtaaggacagcccttttagaccatgcaccgataacaattttcccttccataaaaaactaaagtggaattgtgcaccacaaaaatcacaaaaaacccatgcaaacaagtaaatatttaatttaaaaaatggaaaataataaatcatttgatattgattataacatagtaataaaacgtataaaacataaatcaaatttacagaagtaaaaatctattaaaatgaaaaaaaaatctgcaaatgtagtgaatctcatcgaaacattcaggacaactacagtacctgctttctacaaatttcagtcttttaataatcacataatgctgtgttatggttagcatatattttgattaatgtgcaacctcatttaatctattttaaaccattttttaggaaacttttaaagaaaattcaccattcacatttattttctttgctgcgagtgaccagtctgttaactttaatcatcagctagttgaagttgacataaaaaaaatacacattatacagtaatttaaaattcaaacataaaaatttctcgacaaagcggttcattatttttaaataagtctttttagctgtccaaagaaacctggtcctacccttacttgtctttatcctgatgatgtgctatagtgttgaccaaaaaccttgttttctgatgataactaatcaacacatgatgaaggtttctctctgactcgagacgtgtttagtaaagcctttttgtccatttttaaccacaaatttgctgccacagttattggcactcctttacccattaggtaattggtatgaaatggaaatcaaagtgctttattgccaatccctttttaaaactccttccttttcccataatttatataatgatcttgttaataatttaaaaaagagctactgtgcatgtacaatgtcatacatggggcggttatgtactaatggttagagagttgaacttgtaatctaaagagactgaaggtgagggaagtcaatgatcagagctttcatctaccttcaataaccacaactgagatcctagaagcaatggctgctcattgctcagtgtgtatgtgtgcgtgcgtgcatgcgtgcgtgtgtataatatgtggttgtaaaaagttgtataatggcatacagttggtaggacttagttgtactttgtgaagatggtttacggagacacacctcatgtttctctaatttaaaatgcttaaaaaacatatttaataaagtgttttgatatatatatatatatattttagaattatttttaaggggtttttcacctttatttggaaaggacagtagtggttgcagacaggaaagcattgagagcagagaggggggaagggttggcaaaggacctagagccagcaatcgaactcgggtcgccgtgagcaccgtggtgctatactgtatgtcagcgcacttaaccactaggctattttcaagtgttttgataattacatttggccacatgtttcctgtgagtgttgggtttaggggtagggccataccttaagcatgtttactgtataaaatacatgatgcctaattgctgtaaatatgcatactgttctattattttccagacaaccatttccatagagatcaaatatcagaccatggacgggagtgtaaaggtgtggagcgatggtgaattccttgatattccagatgaccttgatggaaccttccagtttgagacagatagtcttctctcaggacgcagccagagttctggaacttcacctggacgatccattcatggcattcccacattccgcaagtgagtcagccatcactgctaatataatcaccctcatcatcttcatcctctacaggcaacggattgtaagataaaactgggattagaaggcagatgaagaagttaatgagggttaaatgaaggctttattttccattttatgtagctatatggaccacagtgttgcataaacatatatagaagtgtacatatataatcatattattacttcattttatttttgtattttagcacattttttaaactgtaaacacatttttgctgaataacatgaaggcgtagattacttgaatgtgtgggatgtattgatttccactaagcctaccactcttcacatggccccagatccataaattatagccatatgcagacacaacactgtttcttccttatttgtgtgttggcatcattagtgttttttatttttttattttttttgtgagtgtttacatatagtgttgatgaatatctgtgattactaatgatattaagggagttgttaaaagttactggtaaattagagccaaatcatttattgcttttcatttaggattttgaaagctgcactccatttatatttagtatttaatgttgataataaattagtacttggtcaaccaataaatcagatatattaaaaacaaatagtgaacaaatttgcaatctttaccaagagattgatgaatactgttgtttttttatctacagtatgtgttaaatatgacatgtttattaaaacacaatagtaatgtattgtgacatgctagtatgtgctggcaaaatcatcaccttggaattataaggttctctctgcgttctgaaagactttgagatattgagcttcaaagtttttgcattccgtagcaaacagtatgtgtttaacatttgttttttaaataaaaagtcttaaactgtaaaagaaaaaacatcccataatgtaaagaagttgtcatttaatatgaatatgtcaataactcaattttgacaaaaatgtcagatagaaccttagaattcgaaggtgacgacatgttaaaatatgcttacagcattttaaaatcgccactgtaaccctggcataataaaacacactagcaaactagcatctgcattgtgcaaagattcagtaaaggtctttgagtttgtgttttttatcaacataatcataataatcataaatatcttaaagggacagtatgtaagtttgacaccccccagtgcttgaactagcattgcattactgtatcaaaatacatgcaagcgcaggttgccagattgatgggagtgtgcctgactattgagcctaaaggctgatataaggatttgaaccattttccaactaaaagcaacggtatacaatagaagacatttttttaactaaaaggagtttttgtccgaaccattacctaaaatttagattttagaaacggcttctatttcttacaggtaaacaacaggatgaccctcaggtacacctcatgtgctttattcagtgttaaatgctaataatgtgagttttaatgtcattttacatgacatttattgccatactattgaaaacagcaaaagatagtttacctcagatcttgaaaataaaataaaccgttgaactttagaaacgtaatctcagtgcaagccaagttaataaatatcactcattcagcatctccgtttaataatgttatagaggtttaatatgtaccgattagatgataaatcttgcagtttcatgagtaagtgcatattctgtgcttccaaatggctatatttaaattttctattatgttttatttggtgcaagcagccaaatttcttatcactgcaaatcccgtcatgtagcgtgttgttaggacatggggttgtatgtgatgtaacaacaacatggccatgttggacaatgtagcctgctcacctaatgtttatgttcataatatttataatatttgctaattaataaccacctcttgtggatctctgattctgctactgtccaccggaggtcgcatttttggtcacagacacatgctttaagagccttcctaactgatgttcctaacttcctacgctgttttacctgaaggtaacccaaggcgctgaattaaaattggctaaagtcgcagtgtgtgggttaaaagaaacaaagcaaacacaccgttttggcacataacagaaattttcaaagcaaaataactgactttagcattgtttttcagataaacaagaatgttcacttagcatgtttcataagtatggtatttctatgctttaaaagagtaaaaaacttacatacagcacctttaaagaaatatttgacttctgcatacacacgtattgctaatgagaaacactgtaaaaaaatataacccaaaatcatttagacatttatatgatgttcaattcaatacaattcaattcacctttatttgtatagcgcttttaaaatgtgcatagtgtcaaagcagcttcacataaaagattatagtaaattggaacagtgtagttcagttcttggagtttaagttcagttcagtttagttcagttcagtgtggtttaataatgactactgagagtccaaacactgaagagcaaatccattgatgcgtagctctaccgatcccgaaccatgcaagccattggcgacagcggtgaggaaaaaaaacttcaccaattggcaaaagtgaagaaaaaaaaccttgagagaaaccagactcagttgggcatgaccatttccatttctccactggccaaacgttttgtgcagagctgcagtctcagcggctcacctcgtttgtccctggagcgtcacaggaatcagtacatgaatgatgtacatgaaatattagcacatttgtaactcttgggatatcctaccctacgaatttccagaagtttaagaccatttgagagcatattactgatcatccgttatttgtaattttaatgttttcattgatttagttctgtcatgagatcaagtgcagagaaaaatcatatttatatgctattctgttgtttttggatatgcagttatttatcttcatgcatagaaaattcttgtcagagagttattatcaaaacattttagcacatttttaaattgcattaactaactgatatggtaagagtgtatgagaacagacaaagggaggagacgagaaaatgaattcttcaggtatgattaaattgtatgtgtttattatgtactgcatatactagttggcataaatgtcagttgcctagtcagacaaacacaccaaaaagtgaatgtccaagcgatggatttggggtttctgttatacatctttcccattgctgaccagaagtgagcacgaagtcagtgtctttgatgctttattgatgacttctgagctcacgctgaggtttgctatacatcttcaaaaacttgaagacatactgggagtaggactatgctttgtattcgtcttagttctgaactgaatgcaattttagtagttcaagtagtttggtaatacagcaatcggcatcttgaaccatttgaagattattattgattacaaaaatgtgtattatatttatatttggaaatatttgacaatctagaccatgaacaattgtaaaacatttgagacaatttaggttgtctcctttttgcatttataatagtctcctcactattgttacttgaccttcgttcctttttttcattattgtttcattattttactgtgtgtgtgtgtgtgtgtgtgtgtgtgtgtgtgcttgcgtgcgtgcgtgtgtgcgtgcgttcgtgtgtttgttgtacagctgaagttgttgtaccccagtgggacactgcaaatttttagatctaaagtaactgcaagtcctctctaatgactagacggttctctcatcttcacccctctcgctcctccagctttatctctgtctaacatttctctcattcacgctagcttctttccctaaagagtctgcagctacttgaacttgtgctttacattctcaaaaattctgtaacaacccagtgtccatgtgcagtttctgaaaaaaaggtgcatgtccaatataaatgaataaacagatattgacaaggactgctcaatcagtcgattcatcttataaaagatcctatgaccaacttctcagttattgaaatctcagtttagttttttagactttgttttgtttatcttttgattttatttatggtcatcgttctaggctataaaaggtcagagatctaagtaggatgtgtattgtcaaaatccaggtgaatctttactgtttccagcaacagaaaattatgtattggacgtgacttagacgttgacttactgtataaggctagattgaaatggctgtgatgggtttgcacttcgatgttcttactgcaatcagtccatttgaagatcttttgattaagtccctcaatgggactggtcaatttctacctgccttataagtaaaactttattgtcatgtaaagaattatgtatctttaccattataattacatgaagtgctttcatgtttgagtaaaatatggttaattttttcattttttaaaaatctgatcagtttttttatgcctgacccatctatttagtcgtttagctgacactttttctttcaaagtgatttacaattgaggagggcattcagtgattcaccaagaagaggcaatacacacaaatagtgcttattatgcaaaggaacagtttatgctcagaaaattaagtgctagagtaaggagggggagtgtttttatagagagaagaatattactacggatggtttgtcaagcccactcagttgtataaagcacacttcataatgcagttctttttagaaagatggagtaattgtaagaaaatgtctggtgcaaatgtgcttaaactggcgcaattgtcggttaaagtgtcagaaaggtttttttattcctctttgttttggttgttttaagctttgtttagccttttttcacattttttaggggaagtctgcattgcgagatagaagcattgttgatttaataaacagaaattgaattttaagctaaaattttattaaatttacaaatatggaaataagcatttcttaacattctaagtctgtatctcacaattcatatttttttcacatctgaacaattcctactttattcccagaatcatgactgcattttacaattcagactttacaattcctcaaaattctgtttacaatcccaagtattttttccacagaattgtttatattattttaaaatttcccattaattgtattttagtaacatctacccctttcccaaccctaaacccaaccttcacaacaatgtacaacagatctggatctggagtcttctcttttaggcaccgtttacactagtgcgttttagttttaaaatggcgttttagaatgaaaacgatctgcgtccgcacttgcgttttacccagcgtttctgaacagctctccgtccgcaccaaaatgctgaaaacgcacatcacgtgacaacacacacactctcaggcaagcgctgcaacctatctacccagatcagagctctgctagtcggactgctcatcaagcatctcccgctggatctaatctcactatatttattaaacgtgatatttcattcatcttgttgtctttatctaacgacatgttccctgactttggtcattggaatcaattacttgttctcaggtaacgtgttttggctgagcgcaaagataagttaatgattattgtaaccacgtagcctacattctgtatattgactgatcgcttgcctttattattatattataaacttattgtatgttatacttttacattatcaattattaaaacagatattcagcaaaagagagggtatgctttttattttcaatgaaattgaaaggaggcagttgttataggctccgttttgttataaatatccacacagtgaagatgacgctcataaatgcagcacaacgcctcaacattgcattttattgttgagaaagtgaaacaacgtagccagggtgatgtgaatgaagttataaagtacactgttccctttgaagatttacccgtgtcctcggtagtctgttttccatatcaaactgagaagggggagactgcagccttgatcaaacttgcgaagtctgaacttacaagaagaggactgcaggactgaactgtgcgtgttaggctacttaatattaagcaaatgccccaatcaaatagacgaatgtctgcagccccgcctctgttttcagatgtctccgttttccctcatccacactgtgatgaagcagcagcgttttagaatgaaaacggccttaccagcgttttcaaaacgctccgtttttcggcactcgaaaactccagcgtagtgtggacggatggcgtaaccatagcaaaacgtatgtgttttaaaacgaaaacgcattagtgatatcaggccttagtatagcgaatttaccatgtaaatggatgattagagccttctcagccaaccaataggtgcagaaggcccctactgagccatatctataagctgataaccactgataaagcccattcaatcgactgataaaaattgaagcgggtaattctatgtttacttcttaatagtttacaaattctcagaattcctgttttcttcagttctgttttcccttcataattctgaatttacatgtatacagtagtcaacatttgaagtggatctaaaatgttttttaaaaatgtcataagacatgagtggatgttgtttaatagttttaggagaactttgatgaaaggttttgaactgcttcaaatatttagactgtttcacagtgctgcctttttgtcacaattctgccaagatctaagcttgaagaccagctaatctggttcaaaccatctattctcaggctggtttaagctgtcacaattgccacttctgatcagttttactatcataacttgttatttcttaggtaagcctaatcagaagtgttgttctcctgagtttttctcaatgacaggcctaagcttgcagtcaaataaccttaaacagaacaaagggattttcccagggatgtttgtcacattagagtcgctgcattactctcgtggttcagtttgctgtctttgttgtactctaatgttcagcctccatcccaccattcttttgttcttctctcctccttcttgcataaaactgtcactttgaacccacacacactttaaaatctagggcacaaaagctcaaaggcactcattgttcaataattcatgactttaatagagtctcacattaacgaaacagaattgtgctcctttttcattcatgcaataatgaaaaaggagaaaaaaagaccaaaaataacaacaagactatgaaagcaagtacttacagtaagtatagtaatgtctctgctgaacagggtttaaagtgtctagtttataacagctgattgatatttaccatttaaagtatcccgtagagagaaagtaatttataaatagcaagctaatgtactgtacgttactcataactgtgttctgatcaatgatttgatggaaacaaacggctttgctttagttcaggtttttggccaaactcatctcagacatcaaggtctcgctggctcttaagtgatacataattcattatgctgcgttgggcttttcaacacattcacttctgcctagatgtattgctgtgtgtatatctcttgtcatgttttagaaatggaggatgataaacagtttttaaactgactttacgttgacctgaatgattttcaaaattcagtgaggtttatgtgtttagttttaacacatataaaatatagaatatttagaatgaattacaggatcaaaatacaatagttcaagtgatggtagttgagaaattgagaaaatatgaatacttttatttaacaaaggtgcctaaaattggtcaaaattgtgacagtaaggcaattatactgtttagaattgtcaaaacttttcattcgatgtaataacaaataatgttcagtttcttgcacagatctactgtatcatttgcttttataacagcttacagaaattaaggcatggatattcattttgttttgccagtgttttacttttttttttttttactctcaaagagctggtagccattgattttatgaatcaccaaggagaacagtttcaaccagaaatcaactttaccattttatttaataaaaataaattaaattaattaaatgaaatttttataaattaaatttttaaaaaaattaaataaaataagtaaactaaattaaattaaattaaattaaattaatataaaatgcacccacagtacagtaaatggtcttgcagatggattgttttgggtcttttaactttaattattaaaaatgtttctgaatcgccagatcttgatattagaatgattattagatactgtggtactgaagagtgtagtaatggttgatgatctttccgtttgtcataacagaaataaatatcttttttgttgttgtgaataatcaagtttaattgtgttaaattgtaataatattttattatgtaataatatattaattataaatgtaatttgtatttcttttttttactgtatgatgaatactttggcccttggtaaacaaaagagacttaaacaaaaaacatttacaagtagtgcatattcaaacttgcgatgtttttgaattctaatccacattcaatcatttaaatacatttacgtatgctcataatgcatcacatcttaattcctgaagcaaatacaaaatgaatggtctttcacatctctctcccaggtgtcatgttctctcctttcattttgagttgacagttgttgtgctatctgtattatgttactggttctaattcttaaacggggtttagaaataactggtttgtgatcagtgactttatgtgcaccatggattagcttctctactcataaaaaaattaaatgtcactagatctcacccccgcacattaaataacatgaaaaggtcactcttcagtaggagaagagggattacatgctttattaacatgagagtttggttctgcaaaggtttcaaattcttaataaaatttaatataaatgtatgatgtatgtctatttatatactcaaattaatttttgtagtaaacgaaaacaaagactaaaactattagtcaaaaaacattttctttaactgagatagaattaaaattgcacaataaattaaaaacaaaacaacaaacagtcacagaaacatattttctatataaacataaaggtgtcccagctgggtcagttgacatttctgtgttgagtttgcatgttctccccgtgttggtgcggatttcctccgggtgctcagtttttccccacagtccaaagacatgcactaaggctgaattgaataaactaaattggccgcagtgtatgagagaatgagtgtgcatggatgtttcccagtactgggttgcagctagaagggcatctgctgtataaaacacatgctggataagttggcggttcatttcgctgtggcgacccttaatgaataaagggactaagtcaaaggaaaataaatgaatgaatgaatgaatgaatgaatgaatgaatgaatgaatgaatgaatgaatgaaggtaaatatataaacattaaataaagtgttcacataaaaaaaactaaaactaacaaaactatcaatgacaccaactaaagctgaactgaaatgaacagaaatgtttaaaacagcatcaatataaaaactaataaaaatgtaaagctacaataaccttcactcaagtagaacatttgaaatttaatggtaaaattaaatattatttatttatcacaagtatttcaatgagtacgtttacatggacaccaataatacaattttaatgcgattaagacaatacttttagagtctaccatgtatacagggatttttaattaatttaatctgattaaggtcataatcagactaaacagaaatcaaattaagacatgtggagtttgctgagtttgtacagtgcagtagagacctgtaaacaccttaatcaagctattattgtcatgtaggattttcaccacgatttgcgacaggatagtctatacacacacgactgtttgacactattctctgcacctactgagtcagtgaagtaccacagacacctgcatcgtgaaatgctgagatttttttccccatactgcttgaggtttcaaattccattaaaacaacactcttccagcagttcatactcgcaatcaatatctcgtttgtgacaggggggcttgcatgaaatgtttctgaatgaaagtgaaagtgccaaactgcagttaagaagttaaacaaaattagaactaaaaatgaaactcctaaaattacatgaaaatccggaggaaatttggattgcgtcgtgatgcaataatgttaattgaattatgtgctataacatgtaaaattacattatagcacatagggattatgaaaggaactttcaaaaagcaactcatgtaaacaccttaatcataatgttcagattaaggaaaataatacaattactgatgtccatatagtcattgactgatattgtacccaaatgtctttcttgaaggcataaaaaaatgtgcaactgatgcaatctaaaactcctgctttcttctctattctaaagcaatgtgtaggtcaaacagacactttcttatacagtatagtgctgaaagtttaccatacatgtgtgaagtcaaacctactgcaaaactatttcatgtggcacagaattagttccaataaatcccatagacctggcaaaggacattgtttgcactgtcaggtggtgcctgtgggtcgcttgtttcttcatgaccgctgaagtggatcttttgattaaacagagctgctctcatcacgctctaaaaatcatctaattagtgttgggttaccttgtctagatacaatcctgcatctttcttgattttcttttgaattaatctttgatagagtcaaagagaaagtctgaacataaagtttttatgtaatttttatttttggtgatagagtatgttcgaacatacagttttagtcagaatttagcccctttgatttttttttctttttaaatctttctcaaatgatgtttaacagattcaggcaattttcacagtatgtctgataatattttttgttctggagaaagtcttatttgttttatttcggctggaataaaagcagtttttaataaaaaagataataataaaaagcattttaaggtcaaaattattagccccttaaagcaaaatttttttttcaacagaacaaaccagttgtacattgttatacaatgacttgcctaattaccctaacctgcctagttaacctactgtaattaacctagttaagtctttaaatgtcacttgtatagaagtgtcttgaaaaatatctagttaaatattatttactgtcatcatggcaaagatcaaataaatcatattagaaatgagttaaaaaaaactttcatgtttagaaatgtgttaaaaaaatattttttccgttaaacagaaattaaaataataataataaacaggtggctaataattaaggggggctaataattctgacttcaactgtatgttatttttacattaattacagttattacagttagtttatctgataaatgaaaacacacaggacatttgtaattgctacaacgcacaatacttatgtattattatatacagaatgcttcaaaatgattaaggtctcataactattattctgaagtttaaatgttcttatggtggacatctttctttttttctgttttgcagaatgccaggttttgattttgttatgatcaaaaagtgttattctatcaaacattgctttcttaacattgctgaagtttatagattgatattttggtatttagattggtaaaataaagtggtatttatttaatcttttttaaaattaaaccaatataataatcaccattgaaaatatgaatagatcataaatccagagaaactgctataatttacaatagtaaccacagcaaattttgtattattataatattttacatttatttgatacaatatttaatagaatgtttggtaacactttattttaatggttcttttgagtattagtagactgtctgcttaatatctgttgatgctggtcctttaactgactataagaaactttgcaagtacacgtcaacttacactaaccttaacccttaccccaactctaacctcaactgaacagtctacttactgtaaaatctaatgagaattagttgacatgtaaatgcaatataacttaaattcaacacacgaaccatcaaaataaagtgtaactgaatgtttttttattttgattaatgcatcactgctaaaaaagtatttttaatttattctgaatgtatatttagatttacacaacagtaattttatatgggccacatctgtgagatagtgagagtgaatgtgtgggggagtgtgagtttgtattggtgtgtgtgtgagtgtgaggtcacattctctcctgttactttttcacctataccgggccatcatctcaggttctcccttattgtggatgttccgtttagtctgagaagtgtctctttagctgtgtggattctgtgcttgaatctggactagctggactagccactgaaaatggacatatagtacacactctagccaggaatatctatttttatacacattttctgtcgggggatttttggttgtttctgttttggtgagtatcctatgttatttgtgtatctatgaaagcatatgtgtatatgacgtgtatcaggattgttttatttgcgatgctttttgtctttctttgcatagcagagtcagatatttgttttctgctgtggatttcatatacataaacttaacacacttctttttttattttttttaataaaaatgcatacagtcacttagtttcataaacgaaaataaagtaataataatacacaaatgtgatttgataaacttgtgcgctttttacttaagagtaacaaaatagcttttttgtttggaaaaaaaaacgcgtattatcgttatttatttctattaatggataaaatcgtgtgaactttgaagactttctcttcactgtcactttaagttgtttacaaagattcaataagacagactgcatcagatatgcctccatcatataagaatgagctgcaaataataactaaactgcagaatatccaggcaatgtaacctgtaaatgtatgtaattaatccaaacactggtgaagtcagtgtgatcctgttgcattttccctccacttaaagtgctgaaaggaaagaaaggaacaaaacgatctggatttctttcatctagtcctgagaaagtatctatatccacagatcacagctaattggcgaattgtgcccatcttgttgaataattaagtgccgttatttgtccagccggcctgtgacatcatcaggcctttgtgggggaactgatatctaatcaccataatatcagtgcagagttattggacaccagcggggctattgtgagtggggtcccgctgttgaaacgactgtctcgtctgagtgataaatatcacagaaattttccatcatcatgctccagtagtgatgatctgattgcactcaaactttacaaatgataaaataaacttaaactgtatgtacagtgctcagtataagtacaccttatttatacaccttatttgttttttaaacaaaacagatttattaaacagatatttattaaaataatattttagtcaccaaacatatttagagactgagagataatacaattaaattcaagcaaaatattgtaaaaaaaaaaaattacaacctacaaaatttaaactaaattattattattattattattattttgtctcttttgatttctttctcttttataaaatttatatttaatatttttctataacacatacattttggtgtattagtttctgaaccatatttgtcctcagtactgactgatctaatgtatatgcacagatataatattgcatagcttatgaatgtaaaaatctgaatttaagaaagagatttgtgaggggtggacttatgaatgctgagcactttatgtactgtaaaatgtgtttgtatacctggatatcttttaagaaatatctatgtgtcaaagaaaagtgaagttataaatcaatttctcttttctcatgcatccacacataaaaatgcatcatgcgtatcaggctttttattgatttattgacttgtgcaatgtgtgtcatcatttttttctgttttgtaatagacctaaatccatttctctttatttcatgttctcttgaaaatcttctcctgatgtaaacacattcatttgctaaatagactgcagttttgactaagaatattttaatgtgttgcttaactgatcttgactcatttataaaagctcagaaaacattctcgttattgtcagattatcagaaaaagtcaaggaaaaagattgtagaagatatcctatgcttgcatcatgaggcagaggtgtaaataatgactaaattgcaacacaatgtttgaaaattgggggaaagtatctgtccatggcacaacatacaagtgagctgtatgcgttaataatttatatgattaaattgtggaatgtatccaaatgcatcactgcttttaatacaatatgtatgaaacataatcatatttcttagtttaaactggtataaattattcagtgttagggaggctcggaggtagaggtgatttaaaaaggaatcgcagagcaaatattgatttccccctccgttcgtgcttgtttgtgtgttgtgttgtagggcaggaaaaggagtgttctcagccatgaagctgggcaagacccgcacctctaaagatgaccacaaaaaaggaggtaaatattgatcatcattagaacacttgtggaagatgaaagtctaatgtacagtatgtttattgaacaaaattgcgagagtttgaagagtttaaaagacccacccctcaatgacaaaggtctagaatttgtcccatacatgagctcatttgtcctattttgactgttacaccatcataaattgtgaaaataacccattgaaaaaggctttaagaccaagcggaatcctctgtcgatcgtcacatcagtgtgacttcagctaatcagttctggccaatgcaaactattatttttcatgagtccaacatccagctgtgcaataaaacatacaatatgtaagtgaagttatttttcgctattgtattatttttaaatagagaaaacattttgctagtaaattttggaccttattcttgataacaaaaacaaatgaccaataaaaaagcgtgaagcacccaatttggaccatattaaaatgaatttgaatactaatttagcaatttttgttgttatccatgttttttctataaaatgtactttttcttaacaagagaggctagaaaattgtattaaattggcaaaaaaataaaataataataatcattagcagctattaagtataagtatttgtgtctccatttttaatcattatatgacattcattcattgatattcactggttttgatttgttggtattttactttagacatcaattgtaaagactgaagaatcataaactgcacattagacatgaaactttaaaaggaacagaagttgattgcatattataaatatatattttataaaagaaatggagcctgttcctttcaaagtttcacttctgtgctcttgtgtgcagatgatgctgccattctggatgcagaagatctggatcgaaaagccatgcgtctaggcggcattcttgaccctgatacaatctcactggcctcggttactgcagtgaccactaatgtctccaacaaaaggtcacatgtctaatgtgcacatgctgtatttttaaacccatacacgtacactattctattttgaagtttgtatgtttgcttcttgaagtttatatgtttgtgaaaaggtcacagggaagaaaaacctcctatttatgtctttctttctttctttctttctttctttctttctttcttcctttctaaaattaaagaaagaacagtttgctttgtttctgatgttgtttcattgacttttgtttttcatgtaattagtttgataaaaatacctaatcaaggtctagttgacatgtttgattttccatattttattgtgtgctcgacataatacatgcaaaatttgatttaaaacaactaatcgtttaaatttgtgtccttaaggttgatcctcttgtttttccagatcaaagcctgacattaaaatggagccgagttcagggcgtccggttgattatcaggtaggaacagagaaacgattaaacagagagaaaagggagctcgataacattccctcagacaaaagcttcgcagcctcgaattgccaaggagacatgttaagccagtggcatttatccttgagtagtgtattctgctcaaagccttgaaacacagagccgtcccaaataaacaacatgagccttgagcgtcagtgttttagagaggctttgatgtttgcttactaattgtcctctgcatgccagttgaattgcaaattcgcttcagtcctggcactgcataattcctttaaatgctggaaatccatacagaacatcccctgtgtgctgcgtaagtgttttttaggccatttttcacattattcccttatctctaatagttcatattttgccagaggttgggaactctgcttttctgtctttctcttacttttacaactcatttgctgaaagaataattgcagactgcaattctaagcgttattattatctgtgtttttctgaagattctatgaagcaaagtttatttgcatttgtctcttagtattgtagctttggagtgcaataaaggtggcacaatgtggtgaacatattagagacattgcaatttgtgcaacgcaagctcattgtggatacgtacccctgtctacatttctggagactgcaaattatgtacccagaggtatgtctagctccatttcgttcgtaaaatgaatgctatgggctagtatgagatcgccattagctctgttcctcttcatgctactgttaaccgcttacctctgtgtggacagcttttctggtgtcatcagttggcccagtagcttgttgtgtaaaccgatttcctgacagcaggtaaaagaaaagaaaaatataataaaaacaggctgaaaacatagagaaatcagctgcaatgcttttctttttctagattgccttttgaaaacactattggttgggtttagggaagtggttgggatggtttgtcagtcagtcagttgacagcaagctggcctggggtctcatgtatcaacgtttggatttactaacgatgaactgaacgtgggaatgtgcgcagctccacggcagctttatggctggcatacgcacattttttgtgagtgtctgttttatttccattggcgactcctagaggcagttgtgttaaattgctctctacaaagtgtctgagccttgctctagcagctatatgagacgggttcatctagcaggtatataaggtttccataccgtaccgttgaccagctaaacattaaagcacaatttgcagcggtcgcctgttttcccaatgtaatctgagctatctactgcacgcacattgctataaagacactatctgaagatgaattttcatgcgtgaatcagaaacatttccattcaatgaatgtgcaaataaaatatgatgcacaaacttattattgaatcctacttgtatttctcgtgataaatagttggcaaaatctgatatgatgctggattcgaaccgagttcatgctcaaacgtgtcaaaacatgttgaaatgcatcttacgagctgcgccactgagactgttacggatgcagcaacattttacacccataaatcacaccatttcttttttaattcactcagtgcgatgttcagacccaattgtgttaaccgcatcagctaaactctccccattctatttttttcttttgctgttaattccggagaacaaacttgcaaataacaccgttttcctccggtctacctccgaaagcagcacctccaattcacattctgttcaaagtttctctttttgcttgattttgtcattgctttttcgttgggttttgccaaagtagagtcattagcatattcatacgggggaggaggcaggaagggggttttgtgctcgtgcatgttgcgctcagtttcacgttcgttcggatgtacaaaagaatatgcgtgagattcagcatacgcagtgtttcatacatctgaatttttttctgcataagcacaaagctgtaaatgttttagtatgatttccatgcaagtcttcgtacatgaggcccctggtctgctgaagtgtatgttgtgccctctggtggatttacgtgagaagaggacacgtgacagagaccatcaaaaagtgtaaagagtggcttctggcggatttgcataagcaaaaactgcacgcagatatacttgcagttacgtatttcactgtcctcagaaatgtagacctgggtatgtatccgcaatgagcctgggtttcatttggtagttcattttagctgtgtaaatctgaattatcttggctcacttgcgagctgaaaggatgaaaagtgttatgcttttctttccattgactaagtttggtttggtaatttgtctatatgcagccttggatatttactttatgaatctgtgatccagtaggatacgctggagctcatttgtcatttaaatccccaaagcaaacttaactaatttgctctctgtagtaataaatgcataacagatttcacccccaaatgaacacagcctcatcagtcttagtcaaagacgcccactgtaggttttatcagcagtattatttagttgaattgtgatgtcttgcagatcagtgttacagtaatcgaggcccgtcagctggtcggattgaacatggaccctgtggtttgcgtggaaattggagaggagaagaagtacacgtcaatgaaggagtcaacaaactgcccttactacaatgaggtgatgacattcacagtgatgaaacgtctgagcagataataaaacaaagaatataaaaaatatttttcatgttattttatttaggctttttaatcatatttaaaaaaatggaattaatagtgataaattcaaaaagccacaatggatttctgattcaacatatgataatgtaaaggggacttataataaataaataacttgtctaaatatagcccgcctctaatggtaaaacttaatcaagtacattttttataaacctacctaaatcctacagattagcgacgatcaccctattattatcatataaagtatctgtcaaagatattgtcagtgactaagaatcattatgaatgtggggctttaggatgcccaaatgaacagtgtagtctccatacactaccttttttaagccactgtttttgacattttcagtttttcacaaagctaatgctagtgctattttaaatccatgcataggcatttgtagcctgccctcatttgaatttaaagtgacagtcaccaaaatgacacaatttggatcaaagcctaaaagaggctgtttaaaatagttctaaaacatttttgttgggtattttgagctaaaactttacatacacagggacattagagacttattttaccacaataggtcccctttaaatgtttggttggaaaaggatctgtctgtttactaacaggtttaatgcatgttggattagaaatgcacacagtaaaaatgtctgataattaacagttgtccataattcatgtgggtgttttctgtttatttacttttcaattgcattatgggacacgttgctttgagagcttttaaaagtaatttttattgacacatttagtggtttaaagaatatgttgtataagggcgacgtggtggcgctgtaggtagtcacagcaagaaggtcgctagttctagcctcagctgggtcagttggcgtttctgtgtggagtttgcatgttctccacgcgttcgcatgggtttcctccgggtgctccggtttaccctacagtccaaagacatgcggtacaggtgaattgggtaggctaaattgtctgaagtgtatgtgtgtgaataagtgtatggatgtttcccagagatgggttgcggctggaagggcatccgctgcgtaaaacatgtgctggataagttggtggttcattccgcagtggcgaactcggaataataaagggactaagccaaaaataaaataaatgaatgaatgtgtttttaagaaaaattgtacagacaagtcaatttgaatgcaataataacagaaatacttgcagataagtacttggttttgcatagtaatttacaccacttagacagaattttaaactactgttccaaaaatatcaaagcttatgaaagtttaaataaatggaaacacactttaatcagaaactatattttttatttgcttgtttattttacagggacaatacacttggcattgttatacagtacaaagataaccggtgttgcgtacatatagcataaagctaattcacagcccttgtccctgacctcgtccctgaccctaaataacagaacttttagaaagcaagaataattgacttttacttggctgttaagtttcaatggagctgctgtgttgaaaactaaataacacttcaatttagtgctgcgtgactttgacaaagtatgacttttattagctggtttgtttgctgcttttttgctgagtgtgtttttatgccagtaccttttcctacagtatttacgcctgtcagagataaataattatgaagctatgagtgattcaatgtattattcattcaatcgatttctttcaaatgtctgattcattaagaaacgtagtaagtgggtgtcttcatgaatagatcattgaatcattaataaaaagcaaatgacttgattgaacacgcaagtgtttttctaagagagacatatgttttgctcatgctgttggatggatctgttttcattgaccaaccattaaaaaaaaaaaaacaataagttgtctaacatgtaaataatttaaaattccctttttattgtgtaaaatccatattacatagtcatgttctaatgccaataatcgttaaagcgacacttgcttttaaaatataatttaattatcttataaaaacattaatggttatttttcatttcttaatttgaaatgtacattttgcattatgacaactttctaagtgaagtttataaactaatttcgggaggatcgcatgcttatgattgatcacagctggtcccgcataagcttacgattgattaacagatgattcctgactcacttataaataaccagagttttcttatctcagagtcttcatcttgataatttctgtgcggagtttgctttctcccgtgctcacgtgggttttccataggttctctgatttcctcccacagtccatagccaagctcttagcaagtgtacatctcttcttagccattttattagcccaaaataagtcaggaaggtctttgagaacttccttagctcaaattctcctctcgccctgcaaacacgagggagtcccgggctcaaggatctaatgagctcagggctctctcctgggacagcatgccaaataagatttattatcactcatcagctaagtgtgaactcttaaaaaagttttatttcataatgaacactttttttagtcttcttacttgttttacttgttttttttatttttactaagcagtgacatgcattataatgccagatcctacattaaatattagattgtcgtaggtgataaacattgcacacccacgtacagcagatgatgaacagtctcattaatttcatgtctacagccattttgattatctttatctctctctcttcaaacagtattttgtcttcgacttccacgtgcctccagacgtcatgtttgacaaaattataaagatttcagtgagtagataaagccacgcatcatacacttttacaaacctttaatcaaacctccattggaaacagcggattaagttgtacttttttttttgctaaaattaaggtaatacattctaaaaaccttctgcgaagcggcaccctcgtgggcaccttcaaactagacgtggggactgtttacacacaacctggtcggtaaccataaaaataagtgagagatgtactgattaaatgggaagatggcttttatttgttgaatgtttctcacagaacatcagtttcatcacaaatgggcgatgctgtcagaccctgatgacatcacgactggctgcaaaggttatgttaaatgtgacatcgcagtcgtgggaaaaggagacaacatcaagactccacacaaggccagtgaagcagacgaggatgacatagaggggttagtgtgctgtgttctaatcatgtgataataaattgtgccatactgtagcaccaattttggattggtgccagatttggaaggcttgtgcatatttgttaattcagtcattaattaatttattagtacatttgaaggtatttgatattattagatgttaacaaacatagtgttttgcctgattaattcattcatttgtttgtttgttcaataattcattcatccatgcttacaatagtcaatcaatcaatcaatcaatcaatcaatcaatcaatcattcacttactcttacatttaatcattaattcattcttatacattgattcatacatttatttatttattagttcttaccattttattctttttttacatttaattgctttttattctaacatttatttgtttattcaattttgaatgtatttatttattcattcattcttacaaaattcattcttaaaaaagaaacgtagacttgtcatagcatttatgaaactctctgatgattaattcattcatacagtcacctcttttttcatgcatttatcccttaagtcattcgttttatttattatatatttaagtgtcatgtcggtctattctcatgtttgatgatttattgcaggaatcttctcttgccggagggtgttccatcagagagacagtgggctcggttttatgttaagatttatagagctgagggtctgcctaaaatgaacaccagtatcatggccaacgtgaagaaagcctttattggggaaaacagggaccttgtggacccttacgtcctggtgcaatttgcagggcaaaaggtaagaaaccactaaaacatttaacaaggggtcattatttatatcaaacatttttttaattagacagtagcaaaacacttttttggcctgaagtgtattttcaaaatccaaaatacacatttaattgtttattctttactttatttatttataattttaaaaattctaaatctatattctcaagatgagtatttttactttaaaacatcagtttaccggaacttttatactgtacaccaaaatctaattttattcataaatacattctgtcgatttttaccgagggatatgtttatgcataatttgtctgattatatacataacaaatgtagggaaaaaaaggaaaacaagaattttgaacttgtgaatatgtgttcatattcaattaaatagaaaatttgttatgaagcaaactaataatcaatactgtgattaatacttccttgaagatttattaaatgtaaggttttggtctcctgaccttcaccagacatgtacagttgaagtcagaattattagcccccctgtttattgttttccctgatttcttgttaacggagagtagatttcttcaacacatttatttttaccacgatttattttatctttgccatgatgacagcaaataatatttctctagatgtttttgaagacacttctatacagcttaaagtgacatttaaaggcttaactaggtttattaggttaactagggaggttagggtaattagtcaagtcattgtataactatggtttgttctataaactatcaaaaacaaatctagcttaaaggggctaataattttgaccttaaaatgttttttaaaaaatgaaaaacggcttttattttagccgtaataaaacaaaaaagacagtctcgaaaagaaaaattattatcagacaaactgtgaaaatttaaaaaaagaataggggggggggggctaataattctgacctcaactgtatgttctaacatatgtcaccaaaaccctatgttcagactttctcttcgaccctatcaaagactagatctgacttcaactgtatatattatatataataaaaacaaatttcacaaatgcaaatccttagccatgcataatataacaaataatcatgactccaatacaaaacacacaaacaaaaaaagaagaaaatagaattagtaaaaaatgaaatatgtcttaatgattataaattatttgtttagtatgtttaatgttttttttattaattctaataaaaaatgaattacaaaaaaattaagttaacatcctaaataaaaattgacatggtgtttttctcctatgcgcctactgtttcttcaggtgtgctgagtttgagttgattaaaaactcatgcaaataaattgcacttcctaatttaatcaaccaactgatgaagtttggtgatatctgtcagtttaccctattcacctgcagtgtcttgcctaaattaaatgtttctcatgctgctcacagggcaaaacatctgttcagaagagcagctacgagcccatctggaacgagcaagtcatcttcacggagatgttcccacctttgtgtaggcgactgaaagttcagatccgtgattcagacaaggtgaacgatgttgccataggaacccacttcattgatctacgaaaggtttccaatgatggagacaaaggtacctacgatctgtcccagtgaaacactaacactgtaatgaatgtgcaggatgtacatccataaacagtggtttatgtttacagctccactccatctctctccaggtttcttgcccactatgggtccggcttgggtgaatatgtatgggtcgacccgtaactacaccctgatggacgaacaccaggacctgaatgaggggttgggggaaggggtgtccttcagagcacgtctgctcattagtatcgcggtggagattctagacaccacctctgctgagatcatgagctccactgaagtacacatggagccggtgtccaacatctcagaggtgagagtctacttgtacagtacatatgctgtacacatgcatgcttatagaatgaacaataatacaaatacagtatgcatggtgccaccattttttaaatatgacattaaaacaaaacatgtgaaattaaaataaaacatcattttgtgtaaaaacagttaaacacaaaaactcttctgtttacattttaccaggggtgtaaagtaactaattacaaatactcaaactactgtaattgagtgttttttttttttctcaggaatagtaatttactgagtagttttaaaaatgtgtacttttactttcctttgagtacatttatagtgcagtatcagtacttttactccaccactttccttcaacctgcagtcactacttttttttttgtctatgaagattaaaaaattagtcctgtaattcctgtccaatcaaatcgcacatagaaggtaaacgcctcatattgaactacctcaagacatgggcgatttataattacaattgcagtaaactatttggaatcgttaaaagtgttcaagaagatgtccaaaatctttacttgccatcacccggtgaagattaattcagacgcatctcactgatgagaagattaatgtttactgtatgatgactgaaatggccttaaacacccagcagccacaagaccataacatgatgtcagattgacgttgtaccccaaagtcgtgaagatgttgcattttgtttggaaataaaaatcggttgacatcattgtccaacgtccaacctaaaatcaactaaatatcagtgtctaatgatgttacagcttgaggttgtgtgggtgttaccactataatgtctattagatgttggattttggttgccatacttgacgaatatggcaatgtttgacgtcaatatgacgttggttcagacgttgacttgacgttggatttgggtcactttctaacacaacctaaaatccagcatcacttgacataataaaaaaacgttcttagatgctggctggacattgaattttggtcacccaacatcacaccctaaatctatcctaatattaacatcttatgatgttgtgtgcatgctgagcaatgactaaatgcactacagaacgttacgtttatacacatccacaaattagatgtaaatgcatcagctttttacagcgtaatactcactactcactactcttaaataattttgaaaggtctactttttactcaaacttttgtaatatttaccacagatactttttgcactacaagtaacttaagtaggatttttcagtactctttttatcactgcattttaaacacatacagtacatttcatacaaaaccagtcttaagttgcgtgtgtatctttttggcagctgtaaaattacacacattgttaaatacattgtatgggtcaaaactttaaaatattaagtaaagatcatgttatatgaagatatttttttttaattctactgtaaatatataaaaactaaatttttaataggtaatgtgcatttatatttttgtaaatattattttttttaaccataagatatagattctcaaaaggtctaaatataaaatgttaaatattgtcatatcctaacaaactattcatcaatggaaagcttattaaaaatgtaaatatacagtatgatgggttttgaggtccagtctcacatattttctgaaaaatctatcataaaattgtctataagttgcaccacagtcaaatttgtattgttttgagaaaattgatgtggtcatattatcaataatacactgtaattattcgaaagcaggcaaatatcaaatgtttaattattaatcctactagatttctttcttatagaataggatataaataatttgtataaagaaaaacttgaaatgagtgaaatctgcatggtgagcattttcactcattgaaaaaaaatatcttactgcatttctgttgtaatgtttgcacatttttgttggaatatttttatttactgtttaaaaaaagaatccaatttaggtaatctgtaatctctggacccccttttaccatttccaaaggcaaacagatcaatcctgattgtctaaaatatcaactgcccgttgggaaattacaaggccaagctctttgtcctcagacaagaagtcattgcatatgtgggagtccagccgtctgagattttgtgctgcctctgggagcaaatattgattgtcaaatgaattttactgaagggcaagattagttatcacacttgatgtggaggcaaacacatgattctcatagtcccaaatggctttgatggcatgtctaacctgccactttaaaaacgtttgcattgatccaagatatgtgaggaatagagatataaaaaagtgcaggccaaagatatgtcaaaggtgtgatcattgacatgaaacaagggagctagagacgtgcacacaaaatcagatgttttcctagtgataagagaaaaggttgagcagacttcttaaagggatagtttcctataaataaatgttttgtcttttttttcttttttttttaaatcatcttcttttttgtgtaacataaaaggatgcattttgaatactgtacattttctgtgcaattacaacaaacaaggattagagctttttaagcttcaaaaagaaagcagcataaaagcatcttgaaattatcataaaagtagtttttgcccatctggtgcattataacttttctgaagtcatgtaatagctttgtgagattcatttacatttccatattttccatgtagtgcaattcagtgtgtatcatttttttagatttccaaaactatttgttgtgacactggcgttgcaagacatctgattatcatttgcaaacaaataagtcctgcttgactgtatgctgcactataacaaaattattgagagagagaaatacatgcatccaagtgggggcacattaacacaacttgaaaaaaatgtcattgtaaactggctattgaaattttaacacagaagtagttattattaattattgtttcagtctttatttacatttattatcatgtgttttaaattcaactttaatattctatgaacatacagtaggatcaagttaacattgagcaaatttagtagtatcctacactgtaaaaataatacctatatttatatctactcaacaaaattgaggtgacagattacaagcaatattattaattgaattcaacagattaagtaacaaataaattagttaaattaaatgaattgacaacaattaaatgaaaagtactcaatgtttttattttgatttaacacaaaaattgtggagtctgttcatcagctataaaaatgtataccctatacctactcaataaagttaaaattagcaattaaactaaaataagcaattaaactaaaactagtcaaaacctagctgctggtgtaactgtaaaagtgaaaatttaatctcttctataatatttttgtcatcaacatttgaataaattgtcacagtagagtacagtaacagtacggaaaaaagttacttctttatgaatttcatttctgactttctgctaaggacagcagaatataaagagagttttatatgatcaaagatcatagcttcagttcagtgaaaacccctgctgggctaaaacatgaagagtcaattataatttctgactgaactcacatgcccactgttgggaaaaccctattcatgtctgagagaaattatgtgagagatctcgatgtaatgaaatacaaaacagtatagggtatctgttccacttcacagctaattattaaactatttttgtaactttgatcaaatcagtgcatggttcagacattcttaccttaaaatatcttatttcagacattgctgcctgccaatgttgctagaagacacatgcatatactataaaaccttttttatgaagcatggaaacactactaaactactattaaagggccatgaaatgttttgtgtaattttagaaacacataagcacaatctgttatattattgtaaagataatcatgtaaacactaaatgaggtggatttctctctgaatccccggttctgaatgcacacagtggatagcagtgcagcaggtctctttacccgtcttttccaaccattgccggtaatccggaggtatgtaaacatactgtaggcaaacacagcagcacagataaaggggatgtgactgaatggtaacaaactcaactgataaaagacaaactccgccgttctcctgacaaaactgcttcctgcaaaccaacagctttgctgtatctgcccttacagcatcgtgaggaaaaaaaaaatcttgtgaatcatggaaacaaatgcaaacgacccttaatgaatggctaaatactgcttgctgtgagcggacacggtcttacccagtcattgggtctcacagcttggcaggtctgcattgccttcgtaaagcacgtgctctcatgaataattaagaagcaggctcttcttataggataagaaaactcagctattaataataataagaaactgacgcacacattccactagcagatttgcaatacatcacagattttgatcccaccccaaaaattattttaaacccagaagatgaaattagctgacaaaagttctaaattttccagtttactccacaatttaagctgacaggtgctaatgtcgtcctaaatgatgctcaacacacacaaaacagtacttgagtgtgtcttgaacctttaaaaggattaaccttatttgttttatttgatttggtattatttgtttgtacatttaatgtataatttaatacttatacttacaatattgttgttatgactagctgatcttggtgtgtgtttagttgtggaggtgattgagaattgggatgggatgtaaagctgtattttgaactttgtatgtatcagatcttgtatctgtaaatagattttttaaaaatcagatattttttctttcagagtgctacaggaaagatggaagaatttttccttttcgggtcattcttggaggccacaatgatagacagaaaaataggagataaacccatcagctttgaagtcaccatcggtgagctgaagttacctgaagtctcttttcagttctttcacttttcaatatgctgacaaaaatagcaagcaatgctgtagtgatctcaaaacatcaaaatatgaagcgtatgctgcaccacatctacaccattttccacttaggtaactatggtaaccagattgatggtgtgagcaagcctgcattagcgaagaagaagaaggagggtggaggagagagtgaagaagaggagtctgagcttatccacaactccagcgaggaagaggcagaggatgatggagatctgacctctgtaccgtctacacctcctatgaagcctgttatcaccgacaggtcagagggaaatgagaatgtcaaagaaacacttcaaagcatctttaaattgtaacacatagttataaaatgactgtacaatgttagatgtatgaatccaaaaattactgtacagaagagtaactgtttattttcaattagtaccagctgctgccaagttctgtgtctaggtactaaactatcccttttgccttatttgcagaaattacttccacttgccttactttgaaaagaaaccctgcatttacatcaagagctggtggcaggaccagcggagacgtctctacaactccaacataatggacaagatagctgataaactggtcaggctcctgctaaaattgctatgtgactgttaaccgatcattctactctctctaagctgtttttttccaagttatttttgctcaattggacattagctacattaacacattaacattgtttagaattaaattattctgacataatatttaaacagtagatatttacatactgcacaaaaagcaatacatactgtttactttttttttttgtaataagaagctatttatatttgtgacacaggatcaagcctatatcattaaacagtatgcaataataccatacttattgtaaacgaggatatttatcaaattaatgtcttattggcatgagaaggtttttttccacctaagtacccattaaaaatttttttatactatacagtacaagcttccatgtgtttacatggggttcctccgtgtgctcttgtttcccccaaactccaaagacatgcgctataagtgaataaaataaactaaattggtgtattaaagtgagagtgtatggtactggattgtggatgtttgtggggcatccgatgtgtgaaacatatgctggaatagttggcggttcattctgctgtggtaacccctgataaataatggactaagccaaaggaaaattaatgaaaaattcagaagaatgggtgggcttgaacttaggttgatcacattgtcatgtttcttactccctacacaattgttattgaaaaatgggtgtaatttgtcattttggccaggcatttgtccaaaccaggagttggtgggcggagttgatagcccctgccagctgagctggctttttacatttagcgcaaatatatttatgtattttgggagatgataagctcatacatctttatgccatgttgctgatattgtgttaaataagtaaatttcaagcattaaaaatgccctttctggtgcctaattctaagcatttgtaaattagtgtctagagcagggactggtggcatgacatactgcaccagataacgactgaaagaagattttcagcatgacttatgacacttataagtgatcatcactagcaatattaccgtattattagtaaaattaaaaactgctgagtcaatattatgatccccttaagattttataattatttttcagtggctacagaacaaaacgttgttgcccactggttggcctaattaacttaacttgcttaattaacctagttaagcctttatattgcatacttaatactaaaatcttgaaaaatatctagtaaaacggaatgaaccaccaacttattcagcatatgttttacacaacgaatgcccttccagctgcaacccatcactgggaaacactcatacattctcattcacacacatacactatggacaatttaacttacccaatttacctgtaggctaccacatatctttggacttgtggggtaaaccagagcacccagaggaaacccacgcaaacattgggagagcatgcactctctacacataaatgccaactgacccagccgagccttaaaacagcaaccatcttactgtgaggcgatcatgctacccactgcaccaccgtgacaccctacaaaagaaattagttattagaaatgtgttattaacactattatgtttaacaattggttaaaaaagtatctattttaaacagcacttggaaaataaatgtaaaaagtataaataaatataaacacaaattatactggcaatgtgaatttttaagcagagaggactaacaatctaattacaaacatatatttagggttcatgagaacacagctaatgttcatgtctttctttgtaaacaggaggaaggtctgaatgatgttcaagagatcataaaaacagagaaggcatatccagaacgaagactaagaggtgtattagaagaacttagcacaagctgcaggtgacaaaacacagtgagctaatgtgcatacagcgcatgcaacaatcagtaatctcttgacttcttttccttattctccacaattgaagccggtttgttacacttgcaaacaaggatcagaatctttctggaagaaccaagctggacagagagaggctgaagtcctgtatgagagaaatggtactcccacacaacccatttagtttctgcttacacattgagaactgctgatgggaatgtaatttgcgtggttatattgttcacaggagagtatgggtcagcaggcgaagaccatccgcacacaagtgaaaagaaacacagttcgagataaactcaagctagtgttgaatttccttcagaggcttcgattcttagcagacgaggtaaaagaaatcacctgatcacttcctagtgaacacgatcagaatctcaaactttgtggttgattttcctcttagccccagcacagcatccctgatgtgttcatatggatgattagcaacaacaaacgcatcgcatacgcccgcataccctccaaagacatcctctactcaattgtcgatgaagagatgggcaaagactgtggaaaagttaaagctgtttttctcagggtaactcatgctttctatcccatctttataaataaatgtgttgattaaagtacttaaaggaacacttcgttgtttttggaatattttacaagtctcttggagttaaacatttgagttttaccatttttgaaactattcagctgatctctgggtctggtgggagcacttttagcttagcttagcatagatcattgaatcggattatataattagcatcttgcttaaaaatgtaagagtttcgctaattgtgctattgaaagcaaaactattttgtagttatgatttgcaccaagactgttaaaagttgctataggttgatatagctagaaactatactctcgttcttgtgtaataagctaagctaatagtgcttctgcctaacccagagatcagctgaatggattcatggctaaactcaactttgaaacagataaagtcaactgtttaaacctaggggacatgtaaaatgagccaaaaaagtggaatgttcctttaaatgactgaatgttgctgagattctgtttgtttttattacagctgcctggaaagaaaggttttgggcctgctggctggacagttcaggctaaattagagatgtatttgtggctgggcctgaataaacagaggaaagacttcctgattggcctccctagtggctttgaagaaaacaaggcagtaaagggaattggcatacaagctgtccctcccatcagcctagtttataacagtaagtttatatgccttgtatatactctaatggtttctttgctgttaatagagtttgcatgcatgaagctgactctttgtgtcctgatctgtagtgaagcaggtgtttcagctgagggcccacatgtatcaagctcgcagtctgtttgctgcggacactagtggcctgtctgatccatttgcaagggttttcttctccacccacagccaggtcacggaggtgagtgtgtgtcagagtctgaggtttcattatgtattttataatgaagtgttttaaaaaattaaattctggtattaatttctcatccctcttttcattccaactgataagcctttcatttgtctttggagcacaattttaattattttagattaaatctgagagcttcctccctcattctcaatagacaacaatgcctttaatatctatggaggatcagggagctctctgaatttttccaaaatatcctaatttgtgtttcaaagatgaacgaaggtctcagggtttggaacaacatgattaattgacagaattttaatttttaggtgaactatccctttattaaagtctgtataggtactttacagattgttattggctgttgcatatccacaaatacaataaaggctttacaccatgtagttatataaactttgttataggaacaagccaaactagaattttcccacaggccattaactggttggttgcattgtaactaataactgtgaagttcaagtgcgtgggccaatattcaataaaagttatgtttttgtgtgtgtttcatgaaactggagatggaacattgaggtataagtttgaaaagtgcaaaaattaggacaaaattacccatgccaatgtatagttctgtatacacgtaggtgctgagaaaagaatacagaatgcaatacagaatacagaaactcataacataacagcaaatgatgctaacattagatttctatatttatatgtgttgaaacactttaaaatatttagtcagtgttttgattaatctctgttagtttctgtggcaccaaaaatgggtacttccacctgtagttccaggaactactaaaaataaaaatgtttctcagatgagaaaccccctgttgagttaggtttgtctggctgactgttcatttaagtgcattttaacttcttaaaaacatgcttatatactttttttatatttaagtctttgcaaactatgttttatattagtttattttctttatatattagtaatatatacatattttatttataatatagaaaaatagatgtcaatgatatataataatatattattgttaaatattactcagctgatttataatgttgtaagttatttgggactgcaattgttgttaattttatttcattgtttatttatgcattgtacacacatatatctaattaattaaaagtgccatgattaaaccatatatataaatatataaaaagctattacacttatatttatagtaaattaagtaaacttagtaactttttaattgtttaaattgaaaaaattacagttgaaatcagatttattaaaccccctttgatttttttttctcttttaaatatttcccaaattatgtttaagagagcaaggaaatttacaaagtatgtctgattatatttttttcttctggagaaagtcttttttgttttatttcggctggaataaaagcagttcttaattttttaaaaaccattttaagatcaaaattattagcccctttaagctatatattttttctgataatctacagaacaaaccactgttatacaataacttacctaattaccctatcctgactagttaacctaattaacctagtcaagcctttaaatgtcactttaagctgtatagaagtgtcttgaaaaatatctagtcaaatattatttactgtcatcatggcaaagattaaataaaccagttattagaaatgatttattaaaacatttatgtttagaaatgtgttgcaaaagttttatctctgttaaactgaaattggggaaaaaataaacagggggctaataattcaggagggctaataattctgacctcaacaactgtatataggtagttactgttgttggtgtcacagtggcacagtgggtagcacgatcacctcactgcaagaaggtcgctggttcgaggcccggttgggttagttggcatttctgtgtggagtttgcatgttctgcccgtgttgacatgtgtttcctctgggtgctctggtttcccccacagtccaaagacatactgtataggtgaattgaataagctaaatttccatagtgtatgtttgtgaatgcagagtatgggtgtttccctggtttgggttgcggctggaagggcattgaaacaaatgctaagcaaagttggcggttcattccgctgtggcaacccctgattaatagagtgactaagctgaaaagaaaataaataaacaaatgacttttgttgttaaaaatcatcctattttataaatcatcaacctatttctgctgtatatttcaggtcctcagtgagactctctgtccaacatgggatcagctgcttgtgtttgataatgttgaactttacggtgaggccggtgaactccgtgatgaccctccaatcattgtcattgagttgtatgatcaagacactgtggtaagttagtttcaaaaagtccacaaataaaaacagaatatccaggattgaatgctagttcagcattttgttgacataattctccccatgtatgcgtcacgataagagtgtgaaaatgtgctctattgtcctgacttgatgtttcttcctgtttaaaattttctggtcctgcccttttgttggacggcattttggctaagtagagtgtgaaagcttatttcaacactgctgtcaatttctgtttgcatagaaaactgaattcaacaaggcatgcaaaaactggcatagcttggaactaaaaacaagatctttcttctcgctatttccttacttgttgataaaaatacaattttctgttgcgataaacctcttgcattccctgtgttgtgacagtctagagagctagctagtggatgtttttttatagctgtagtatttgtagtctgtagtaatgattgctgtggtttatttaattgagaactgagggtcacggtcaaatataatattaatgatcctctatttataatatttagacagtatttgagtgcaaatgttttggtttgaaatttaatcaaatcatttggaaatgacaaccaaagattgattttcaaatcttaaagccgcagcaatacagtagccatgatgtgaaagtgatttttcaagcaatgtgcccacactgccccctggtgtttgatgatgatattgcaactgctgtgttttcgtgtggcatccaggggaaagctgagtttattggccgaacatttgcaaaaccacttactaagatggttgatgaacactacggcccaccgcggtttcctccccagctcgagtattatcagatctaccgaggaaactgtgctgcgggagatctattggctgcttttgagcttctacaggtatacaatgattgatctacaagtacaatctcaaatctccactgaactctctgtcagtgcttggcctaaattttcttaaaatttgcttgaatagtacagctgtgaatcactcttctcttttccttccacttgtccttgattcttggtctcttttttttttgtcatttcccatcttttttatgtcctgtcacgtttgtctgctgtactctttcatggcacctttgacagattccttatgacgatgaggagatcagaagagctcttattgctgtccatgactttgctgtgcctcagatcaaggtgcaataaaaaagtagcattttctttctttaattgttatctttgtttttcattcgtctgtcagtgactccatcctctttgctattgctgtgctttgctatttttcatgttttacgagatttaatcaaaatcgaggagttaatcagcaatattagtcagtcattacttcaatattctttttcagttatgttttagatttttcatttaaaatatttgtttataaacagattggtccagcagggcgggcagcacttcctccaatcgatggaccgaccgattctgaccgtgggcccattctgcctgttccattgggaattcgaccagttctcagcagatatcgcatcgaggtgaaaacatgccccagccataataagattattaaagtgctcctgtgctttcatttgtgaatgtagctgtttgaatgtaaaaggtctgcaaagtgcaagttaaattgagttattgtctcctaaaagaaataactgattctgacctgagtcgtcggtacttctagttttacttaatggacaaacctacttgagtttgtaacagcattgcatttgcataattccagcctatggtctttattggttgcctgtgggcacgatgatgctgcagtgtacagtcaagctcaaaataattcataccctttgcaaaattggatttaaagttacttttattcaaccagcaagtttttattattattattattttttttttgactggaaattacacaggcctctcccacaagaagaagatgcaacattgaggaaaaaaaaaattttaagtaaaaatatttatttaagtaactcattcattcatttcttttcggcttagtcccttcattaatgtggggtcgccacagtggaatgaaccgcctgcttatccagcacatgttttactgcatgcccttccagctgcagccaatcactgggaaacattcatagacactcattcacacacacactacggacaatttagcttacccaattcacctataccacatctttggacttgtgggggcacccggaggaaaactatgccaatgcggggagaacatgcaaactctacacagaaatgccaactgacccagccgaggctcgaacctgcggccttcttgctgtgaggtgattgtgctacccattgcaccaccatgatgccccctctttaagtaactataagtcagaatttaccaggggtatgaataattttgggcttgtctgtatgtgtaagaaactttggatggatgtaaactttttgaaggagactttcacaataagactaggaacttttttaaaaagcatattggggcactttattaaaggcctagtttacccaaaacttttatcaacatttactcacccttccaaacatttataagtatataagtatatatatttatttctgttcaacacaaaaaaagatattttgaagaattttggaaaccggtatccattggtgtccatagtagaaattaaaatactacggaaatcaattatgaatttcaacattctgtaaaatgtcttcttttgagatcatcaagatttgaaacaagtggagggtgagtaaatggatttgactttgtgtgaacagttgttttactacatatagctcatttactttttgcttcaatatgattattattattagtattattattattattaatgtttttttttgtttctcacctaggtcctgttttggggtctgagggaccttaaaagggtcaacctggctcaggtggaccgacctcgtgtggacattgagtgtgcagggaaaggagttcagtcagccctaattcaaaactacaagaagaatccaaacttcagcacattagtaaagtggtttgaagtggtgagggaaattatacagttgttgaaaatgtaaaaatatctccaattcttttttttttttttttggaaattttaaaattcaagcatttttgtcatgtaggatctgccagaaaatgagctgctccatccaccacttaatattcgggtagtggattgcagggcattcggacgctacattttggtggggtctcatgctgtgaccacccttcgcaagttcatctacagccccccagacaagactgctaacaactgggctcacacaggtacctgtcatatgcctactatatatacctactgtatctgtatataacaaaataatattctatttaaaacttttcttgatttccatggtttcagtagcatcaaattttcctgtgatgatactgaaccatgccccttttttacaccatatattaaattaacatctaattaatatatgaagtgattcacttataattggatacactactgtgcaaagtttggagctagtaggattttacactgtttccacaaaatatatctctgaaaaaaaactaactgatgatcacagttactattggttgactggatttgccattaaatgtaaaaaatgtaaatttgtgttttgttttataagctattgattaaagtcttcatattttaaacagaatatataaaagcattttaggatgattttctgttatgacagtagaaaatgttttcattgaactgaaataaacattgctgttatgctgtatgtttacatttccaaatacatgcagccttaggagcataaatgagtttccaaagctataaaatctgaccaaccccaaacatttgaataatagtgtataagacaacttgctatttcctttttccaccttttctgattttccaatcctttcctctcttctttctttctttgatctcttcgtggttttatcctctctgtcttgatgctggtctctggtcattggttgatgaatcttatgaccctgcccacaccagctagactggccaatggctacctggctctcagcaatgggacgtctcattcccgcccccaatcccgtcctgtttcttatccctcaggtgacattgtggtcaacatgagccctgaacctaacattaagaagatggacacggttgtcaagattgaagctgtgagtagtggaagcatgctgtcgtgtgttagaaaatgactttgtttttattcacgttttgtttgttttactgctttaataaataaaccacccaaaaatgaaaatttactttctttcttttaagaaaaaaaaaaagatattttgaagaatgttgctgatcaaacagtttcaattaatttccaatggttgaaaaaacgggttgtttaattgttacgttttcaaactttttttaactatgatctttctttgcattcattattgtattttttaaatcatttttttacttaataaatgaaaaaaaatgctaagtaaattaaaagttttgggtgaaccattcctataagcttagtgtcctattttaacaacagccatcatgcaatgtgtatgctagtgagctattactgtggatgttgtttgtgctgtatttgatgtatgtcttgtgtgacctgtgcttgtagaccaccgatgcggttgttaaagttgacttggtaagtctttgcttggtttagacagattcagacagataatgtttacaggaacctgaattacaaattagatttaaaataatataagcatcacaactacctttgtgttaacagaatgaggatgagaaggagaaagaaaagaagaagaagaagaagaagaaaggagaagaagtggaggaagaggagccggatgagagcatgctggactggtggtccaaatactttgcctcaatagagactatgatggaggtgggagaaactgcctttctgttcaacttccttcaagattcttttcatttttactttatatatatttttttaaaatgctgtgcgatatcctgccagtaacagcactcgtccagtctcttaaggcttcaaccttgtgtatcactccgcccacatacagcgacaagcagaggacacagtttgacaaatattcctgctgttgggcaacacaatgtactttgaggcttttttagtcgagaatgtagttgttcagattgcaactatgcaatttatttacaaggatagtgccaatttttaaaaatatttataatttctgagtgacagcgtgtcagcggccattagcctgtctttgagcaaagacggttgataatgttcatccacaagatggcgtcagagaccgcataataagccctaagagaaactttctaagtcgatccctctcttttgtatgttgtagtgctgtatttataccatagtaatattgtgatctccctattgcaaaagagaaatacatctctgtagactgatggcctttcatgccgttcagccttataatcttaaaatgtgagcaaaatcacctgttttgtcttcactttagacattacgctggagaatcattcaaatactagctcttaagtgacgttggtgaagtagctacggtttctgctgttttgacttcagctgcagatgtgtaggattggcgaagaaactagttcctctgattaaagggttttgagactctccgtgtttgattttctttttcttatacacacgattatgccgtcaaactgtggtattaacgcaatgtcacatgagttgaggtgcgatgtggctgtatattgtcactggtaggacactaaggcactcggccgcacgcctcccaccagtgtcgatatacagcaacatcacactgctacttgtttgatattgctcatatatatatatttatacagtatatagcggctttaaaatgagtttaaataaattcaattattattttagtttattaaaggttaaaaaatctactaaaccattaccacttttttctacaccctatgataatttgcacaaattatgaaagtaatttctgtaaaactgtaaataattagtaagtgttttaaagaaggagtccagtgaagtaatattctcctcactattctattatcagattttaaaagaaaactatgctgtaaatctgtgatcctgctcttttattcccttcaaaatgtaatttgaaatgtcctggaaaatgaaaaattaagaacctaagctaaaagttttggttttagttctgcagaatatgaatccatgtaccatctctttaataatatggaatgtgtcatactgtattttacatcacaatatactttctttgcagaatctaagagctcaggaggccgctcaggcagaggcagaggaaagagaagatttggagattgcagcagagagtgcaggtaaacacagaatttagtgtggactaaagcatagatacatgtttagatgagcatcatcccatatccactgttgtagtcactgttgacattaaactattagtacgtatctccttttcacgccatgaaagctagaaacatgttttgatactatttaatatttcctacttattgggtacatttatgctttaagagtgttaatataataagttacagctattattattattattattattattattattattattattattattattatgagtcatctgttattttaggtctttaactctcatggcttgaaacatcactgttcactataaacatccattcagactgtcattgtgctgtaaagtagatgtgctcacatgtctttcatatccattcgtacctacccattcactcctaacctcagagatcaaagctgatgactttcctatgaaaggcaccaaacctaaagagaagagcaaagacaagaagagcaccaaggacaaaaagaagaacaacgatggcacagaaaaacgacctccaaaaccaaaagttgatgaactcatggtcagtgcttcttcttgaacatattagtcttctattcttgccttgtaaaaacaaattcatttgaaatgtactcacactactgtttgtcataagaaagatttatgtgtttatgcatttatttactgaaaaaaaacaattagttgttctctttgaataatcctgttacattaaggactggagtaaaggctgaaaatattcagatttgacatcacaggaataagttaaagcttaaaatatattaaaataggaaacatttaatatttttgagtgtttttgatcaattaatgcaatattgaaaagtgtcttccacactttgtaacagaagtatacaagataaaagaactgtaatctgaagaaatccaagctaaagatctttatctcaggtgtacaataaagagctggagagtgagttcggtagctttgaggactggcttcacaccttcaacctgtaccgaggaaaggctggagatgatgatgaccacaatgtggttgatgaggacagaattgtgggcagattcaaggtaagaatgagtaaaacacaaaacactgtatacattcaaagtgtgaaatgattttgatattttgtcttcttatgaaccagggctccctctgtatgtataaactaccactgtctgaggagatcaccagagaggcaggatttgatccaaacatgggcatgttccagagtattcctcacaatgaccctatcaacgttcttgtcaggatttatatcattcgagtgagtgtattcaactccaaagatttaagttgacttcacttgtgtgcacacaataacatgtgtgttacaaaatgtaaatgtgataatagcagacacttaaacagtacactatacatgcttaccatataagtgatgtgcagtgcactatatgcatatccattgtatgtataaatctggtgtatacattagggttaagttgaatgtgttttatgcactgttccttatctgctaaatctgcttaagaaaaatgaatctctactcaggccacagacctgcatcctgcagatataaatggaaaggccgacccttatatagtcattaaattgggaaagtcagacattcgagacaaggagaactacatatccaagcagctgaatcctgtctttggaaagtgagtagtaatccaaacaaactagtcaagtggatttcgtttaagctagaaattttagtttaggtaccaattctcactattaaatggagttaacttgttgaaaaggttcggcggcggaaccacgcctcacacctactccctattttctcgaatctgcacttgcagatttttagcccatcattgattctgtttatttacttgtgtaaatgtgtgtaaattcatatttattcagtttttaaattaaattcagtaatattattgactaatattaaaacatttatatgatttatttacattatagtttgtaaagttatattttctgtcttttagtagagatattatttgagagatttgctttgtttgccaaataaatgatctaattggatttgcattgtaaacaattcatacaagtttaaaatatgttacttttagttcatattttaaggttttagtcatgacactcccaaaataattagagacggtacccccactctaagattttgggcatcatcgtaggatgcccgatcaacctacctacctgttcactgtttatcatcttatttcccttccccttcatgccactgttctcttaccatccccttcatttctacgataaagtctagctcaaagtttgctgtggtctatgctggtgaactagtggtttattacttgcctattattaagatattggctgtttatttgtgcttttaaactacaaattcggcctgatttttttctgcatctctcataataaccaataactaaactactacgttaataactattaatgagcagggaattagaagtgtattgagctaaaagtcatagttaatggtttgttaatagtgagaattgtaccttaaaataaagtgtgataaattttttttattataacttaaaaacacaatctcctttctccactctccataaggtcatttgatatagaggccacgttcccaatggagtctatgctgactgtggcagtgtatgactgggatttagtcggaactgatgacctgattggtgagactaagattgatttggagaacagatactacagcaaacacagagccacatgtggcattgcttccaactactctgtgtaagtgtcttccactgtttactttctacaggaaggtagcacttaatgggtgctatagagtgttttcattttggggttgtcaattgctaatagttttttttttttgtgatgtgacaattcatgaaattgatttcatatatcaacccatatagaaatctgatctatggtaatatatgcaacttacatacatgtatatggcatagaagttcatattttgatttcacatatataaaatgtaaatatgcaacatacattataaagtattgcaaaaattgttccacttatttatttatttattaattaatttatttatttatttattatgattcacaccccagaggtatgtaagcgaacatttttgtaatatttgtaaaatgcaaatatgaacttgtatctcttatatgcattttgcatatgtatccatgcatcatttttctttatgggaacaactaaaactagaaaagtaatgtacgtaagcaaaatttatggtggcttgagaaagcctagcctgaaagatagaagtagttttaaagtgtaagtacctaaaatagttttataagaagtttgaaacagttggcatagatcagtggttcccaaactttttgttgtgtgcacccctttctaatatttgacacctgtcaagcacccctttctccgattaaactccacctttttaactacaataactaaataatattttctgtatacattattaaaataaaaataacaaaatacgtgaatttaatggttgagcttttatgaaaatggcaattttcacagttcatctggcatgtttttcatcgctagagcttcttgatggatgctgcagtctacccgggaaactgatggtccattcctactgtcacttgacttctttaaagtgccagtttttatccaggtgtccattttgatgaatatagtaagcaaaaacaaaaaaaaacaaaaaaaaaaacaaatgtactattccttagcgcctaatgtgaaagggtggggcttttgtgacgcagacgtgaaaccgcgacatgattgagcatgcataggttgtaaattacaatttatatcgtgtttttttctctctctgtgaatttattttccctcaaaaatatgacatctgaaattcacccaagatacatgcattaaaataaaaaagataaattcttccaccattaaaaacattctctcgcacacccctggtggtcagactgtgcacccctagggttgcacacaccccagtttgggaaccgctggcatagatagataagcacatacagttgaagtctgaattattagcccccttttgattttgattttcttttttaaatatttcccaaattatgtttaacagagtaatggaattttcacagtatgtctgataatattattttcttctagagaaagtcttatttgttttattttggctagaataaaagcagttattaatttaaaaaaaaaaaaacatttttgggacaaaattattagcccctttaagctaatttttttcgataatctacagagcaaatcatcgttatacaataacttgcctaattaccctatcctgactagttaaccttattaaccaagttaagcctttaaatgtcactttaagctgtatagaagtgtcttaaaaaatataaagtaaaatattatctactgtcatcatggcaaagataaaataaatcagttattagaaatgagttattaaaactattatgcttagaaatgtgttgaaacaatcttccctccattaaacagaaattgggggaaaaataaacaggggcgctaataattcaggggggcttataattctgacttcaactgtatatgttagcatgtttctaggatggattggaatgtttcttgctaggcggttgatagtggttcggagtggttgctaaggtgtttctaattggccgctacggtgttctgaatgcttgctcagttgtagctaggtggttgctagggtgttctgagtggttgctaagcggttgctaggttgttttgactggttgttaaggtgttgctagacagttgcttaggtgttcttagtggttgctaggcagttgataaggcattgctagagtgttttgagtggttactaagcattgctaggcggttgctcgggtgtcctaggtggttgctaaggtgttgttaggtggttgctaaggggttttaaggggttgctagggtgttcttggtggttgctaaggtgttgctaggcagttgctagggtgttcttggtggttactaaggtgttgctgggtggtaactaaggtgttctgagtggttgctaaggcattgctaggtagttgctaaggtgttttaggtcattgccaaggggttgctaaagtgttgttaggttgttgctaaggtgttctagatcattgctagggtgttctgaagggttgctaggaagttgctaaggttttgctaggtggttgctaaggtgttaccaggtggttgctaggtggttgctaagatgttgctaggcagttgctagggtgtgctctagttgctaaggcattgctatgtggttgctaatgtgttgctaggcggctgctaaggtgttgtaggtcattgctaaggtgttgctaggcggttgctaaggtgttataagtagttgctagacagttgctaacatgaattgaattagcatggttctagtatgatttatcatgaggctagcatgtttccagtatgaactattatgttgttagcatgaatttagtatgaattaacatgttgctaatataattagtatgttcgtatgtttattagtatcgagtatggattagtatattgctagtatgcattggtatgttattagtatgttcaatgtacagtcaatggcagtattttcacaatggaagtcaatgggacagttgctaagatgccataagtagttgctagagtgtggctagtaagttgaaaggtcatcagtgatcggcagattggtagtctgaattaaatgagccaatgggacttttccaaatgctccgggtcagttttcggaaaaccgtaggtcggatcagttggaaaagatatagcaatgtaattcagtgtagtttggaggtttggtagttgaagtatgaacggtctaggaaaagatgtgctcctaaattattctcaaaagaagaagtttattccagtatgttggctttctcaagccaccataaatatatcataataaatttgacaaactgaaagtctttggtgacagtaggtaaaagttaaatttaattctcatcaaatccatccagccatggttataatgtatggagagatcctcagaaaccagctcagatcctggctaagttgtgcaaagaaggtaaactggatggacctcactatggacctgggggaagagtcaaagttgcaaaccggatctttcttgggccgacagaaattgaggatgagagtggtgagacatttgtaaagctaatatagagcttgtattgatgtttttcagtcatacgtgaaaacatattgattttgtttggcttacaggtctgaaaaaacaaacagaagaacacttggcgctcacagtccttagacattgggaggaaatcccacgtgttggttgcaaactcatccctgagcatgtggagacgaggcctctcctcaacccagacaagccaggcatagagcaggtaggaaagagtggacaagaaaatagtgctgggatcatggttcacactgtgttcttgctgaatttttcatcattggaaacaaaattcagagaacatgatggattattttgaacaattgcatattaataatgcctgggtcaatgggtagtttatttcagtatgttgagctggagctttcttttttgcttatcattcacttataacgaactaagggtaagagggaggtgtttaagaatattgtggctgaagccgtcaaactgacgtcaaaggtgacagaccaccactccaaatgtagaagcaaatggtcagattttgattgaagattactgaaacctttttttcagtggataaatagattaattaatcacttaaatgaattgtgtggtagaaaaataaacatggtaaatttagattttacacagaatttaagatgtttccagggaatccccctaaaacagtcagttgaggcattttgctttactaccctgctcaatttccttattgaagctgagtaaaaagttattttaaaggggagaaatcatcgcctgctcagaccctatagggattggtgaatgaacagagattctgttgtgattgggcaatgggcagaattttgtcagttatcagttcacaaaactgcattgaacagttaatttgtgaattgcacttctctgactgcaactgttcttaagttaacaactcactgattcaaatgaggcgacgtagtgatgctgtaggtaatgctgtctcctcacagcaagaagatcgctgattcgatcctcggctcagttggcgtttctgtgtggagtttgcatgttctccctgcgttcgcgtaggtttcctccgggtgctttgtcttatgtatttttgccatagactagtgttttctttcattcatgttcctttggcttagtccttttatttatcaagagttgccacagcggaatgaaccaccaacttttccagcatatgtgttacacagcggatgcctttccagttgcaacccagtactgggaaacatccatacacactcattctctcatacactacggccaatttagtttattcacttaccctatatcgcatgtatttaagccaggtctcgaaccagcgaccttcttgctgtgaggtgacagtgagccacagtgtcgccatactagtgtactgtatatgatatgttattttttgtttccactattgaattattatgcattatggatatgacaacttttggtaataaatttttcttgcaaaataaacattcatcagtaatacttttaatacttaagtacattaaaaatcaagtacttttacattaagtgaagtttatttataaactaatttcgagagtatcacatgctaaagattgcttgcggctggcccagcattatccaattcatgataaatcaatcagacgattcctaagtcactataaatgccctaagttccatatgacagccagctttattttgaaaaattcctccttccacccctactgtggcccagcggttagcactattgcctcacagcaacatcacctgttctagtccttaccaagccagtcgacgtttctgtgcagagtttacacgttctcgccatgctcacgtgggtttcccccaggttccctggttttctcccaccatccaaaaacttaagttaattgactaatccaaatcggcaccatagacatgctccttctaagtagttttctcttaagagcaatcactatctgttcattagctactacagcaggggagttcttgagatctacctgagctcaaactcccctcttaccctgcaaacgggaaggagcccacaggctcaagaatcttatgagctcagggctctcagcatgccaaacaagctttataatcaatcatcagctaaatgtgaactcttgaaatgcaagtaaaatttaaaaagaaggctttatactttactggaatatcattttgttggggcattcagactttcacataagtgcctgatgatgtgtactttatccaccaattctgaaaacgcaaagtggtgcatttgatcattgttttagtgcaatatcaaatcctcaattgttttctctcaatctcaaagggaaggattgaaatgtgggtggacatgtttcctatggatgtcccagcaccaggaccagccattgatatatcgccacgcaaaccaaagaggtatatgattccattattttatttcatttttagttcaagcttttagtggtttcagttattcagttttaaggaattaataattgacttgtgcattgtgttgcagtcatttcacatgctttatcttaaggagtatgcaactatactcaactatacgtatgcaactatactattaaaaagtcccattttaatacagtatgtgcatcagtgagttgaagatgagactaaaataggaagctttaataatcagtcctgctgagatcacatactcactattagttcattgcaccctcaagcgaggaacagattgctttatttggactgtgtgtgcaattaatattctttggatgatttaatcgccttggatgaagccatggctttgaatggtgtattgccaaactaaagaaggtcttttttttcttctgctgtctcttataattgtttactatcattttcaattgtgttcgactacagtgatacagctagagtttagagacaaagaaaccactcagggtttgtagataaaacatatctttattttcctcccatatttactctgccagcttcgcacctccatctgcattaatttcttctttttaatcatctaaaataaacctccacaacaaaatcaaatacaagaccaggcatgtgcattaagaaaataataaaaagttatgattactaatctgacaaaattacatgtcaagattaccacattatgcatttttgagggttaaaaaagtttttttgccagataacaccaaaaaatgttatagttgtaattaaaaacttatatacacagcatattgacattttgactttcatcagctttcattatattttagtttaccatttttattcgtttctgttctttgatttcatatattttaatttagttctgttttagagtgtgtttagtgtgtgtagatggcgtgaaacaaacttttgcagctctccacaatcgttctctgaccggtcttctagactattgcgtcttgttccctgattcgtcaggatcctctcatatgaccgttaagcaactggtacattgcaagtacagatggcgcacaaaatgcacatgcccagtgaagatgaagggtcacttatcatgcattttagactgtttagtgtggaagaatactttttttcctgaaactcagtaaaaacacagatttagaccgggagcaattttattctaatgtgacattattaataaaacatgcactattttgaatgcagtctaatgctgttttcacacctgcattatttagttcacttgaatcgcactagagttcagtttccctcttagtgctttttttttttgggcaggtgtgaatgtagcactcgagtgtgcaccaaaagcagaccaaaaaagtgtacagaggccttcttgaagaggtggtctttcaaacgaaccctgaatcggtttgtttggggtgagaacatgatctgaactaatacagacccaactgcaaaaagtattgcacctttttggactaaacccagctgatgttgcaaagattattgaatacacaagacatgtcactctttttgaatggggaaaagtttaacggtcattatggtaaatgaagccccacctactagtacaggagccaatcatcgatcactatatggcgaataaatcccaccgtccaaggcgatcgctatagactgacgattctctgggacaggggctcggaccagacgtgagtttctgcagattttgtgtgatttagatgtttagaaattaaactaaagacacagttatagtttaattttattggtgtttcctaatacgaaattttattgtaagcttggcaagcagttttggagaatatgatgttcttccattcagacaaaatgccagagcataatgccagagaggtgttttaaagatggccactgagtaaaatgacttgccttaaagggactttgggcattggcattttcctgtatgttaattctaaccaatcgaagtgaagtttcacaaactaatttcgagaggagcatgtgataggattgactgcagctggtccctatcgctattagtaagccaattggataattccaaatttaacataaatatccaacctaacttcattccctatcttcgatccctatcttcatttgtcacatgactgcatttttgttcatttctattggttcggactaaaaccatcagtgtgttgtgaaaaggcagaaaacgacagaaaaatgctaaaatgtataatttgttgcccttggtccggaccaaaggaaccaaaccacatatgtgaaagcacccttagagaaccagaactgactgtaaagagaacacaagtgtgaacacacctttggtttaattcatttcaatttagtaacttttattttttctattaagtttttacacttgattcatctcagttttcaaaaatgctcttcatagataaaacttcattgttttattttttttttacagtagttagtgataataacctaggtttgagatgatgctctcattgttttccttcccctccactcgtctcccagatatgagctcagggtgataatatggaatactgacgaggtaattctggaagacgatgattacttcacaggggaaaagtccagtgacatttttgtgagggggtaggtatgggcagctgtgtgacaagtgtgtggttaatcggttgcctttgtttgtttgtttctgtttccttttgtttgtctgtcttgttgctttggtgttttttttttttttttgtctatccccctccttgcccccgcgtcattgctgtgctgttctctagctttgagcttcgtgttattatttggaacactgatgacgtaattctagaggacgatgctttcatgacaggagagaagatgtcagacatctatgtcagggggtaaagacgacacgatcgcatggcttgactgctctgcccatcagaaacctgcacttaccccttccatttaaaacaaatgaatgaaaaaccacctttcacatacagtagatccaagttaaagggttagttcaccccaaaaaattaaattatgttattagttacttcccttcatgtcgttcaagttccctgagacctttgttcgttttcggagcacaaatgaaaaatattttagatagatagatagcaatggtcacaagacattcaaagtccagaatgaccaaaaatggccagataaatttaaaaagtcaatattttgacaactttgaatgtctcaggaccattgctatttatgagagagctcctggagttcatctaaaatacctcaaaaggatccagggtattgaaatgacatgatgataagcgattaataacacaattctcatttttgggtcaaataaccccttaaacaggaccatatcattccaaaagtggctgttttacctctgaaataatttgattatatgcgctaaaattagtagaaatgtaaataattggtgtacattaaatatatatatattttttacatttaacatttaatagttaatgtaatattttataactggtatggtcttggtttgttggtacatttttttttcaaatgtcttggagtctgagatgtctttctaatcaattactgcatgaaagcataagatctgtctgtttgcatgccaaaactagcatttgcatactaacgttttgattctcgatccgtctcaagaattgaatagatttttttctatgcatgcatctgctctatattgttgtctataatagctgaaataaatcatgatacacgggatctttgtatattgctgatttattgggacaggctactttttcaaactgatacgctttacaacttaagtgcaaataatggagttgatacctggtcaaggatctctttttcttttttatttgcagagagtgcaggagtaattgcatgcactctttttcaaattagattattaaaaaaggagtaacatgcacataacacaagtcaggaactgatgatctacagtacacattatttacaattttatgtttttttatagtataaaaagtcaaatttttatatatattaagtggttaaaaacactaagtatagggtggaatatgtttgttttttttgttcagtttcctgatgcattatggattttcaatatataatgtataaattatattatgcatgttgtctctggtatttccgtctatacattttagttttacaagtttagaacatttgtgcatgttttgttgtgcaagatatatgaggagtcattgttgatcctgttgcttgtaaattgtttgtataaatattaaaattgcatgtaacaattgaaaaaaatgttcctctgctcagctggcttaaaggacagcaggaggacaaacaggacaccgatgtacattatcactctctaactggagagggaaacttcaactggcgctttgtcttcccctttgactatctcatggccgaggagaagattgttatctccaagaaggaatcaatgttttcctgggatgagactgagtataagatccctgctcgactcacccttcaagtatgggatgccgatcacttttctgcagatgattttctgggtaagcttacaattaaacatttttaaggctctacagtgtgaccgtgtctttttttatttctggaagctctaaaggttgttgttggctttggacaagcaattcaacctttaaataaaaaaaaagaatgttggtttttttatgtttaaatggctaaatttacatggacatcagtaatcaaattgtttgccttaatttcaatacaacaataatatgattaaggtgtttacatgacttgtctcttgaatgttcttttaatgatcctgttttacatgttatagcacatcattcgattaacgtcattgcagcacagagaaattggatgcgagtataaactgctggaagagtgttgttttaatggagttttatactgcatgcaagaaaaaatctctgcattttgcggtgtgtgtctgtagtccttcactgacttaagtgcagagaatagtgtcaaacagccatgtgtgtatagactatcctgtcgctaaaaaagatgaattgtcctacatgacggtagtttggttgcagtgtttacatgtctctactgcacttcaataatgcgactaaaatcggcatactccttgtcttagttcagtttctgttaagtttgattatgaccttaatcaaattaaggtaatcaaaaatctgtttacatggtagactcttaatcagagtattgtctcaattaaattattggtgtccatgtaaaccatagactgtaaaagattatggatgtagtatcagtgatgtcacccataggtttttgaagaaccaaaaagaagctaccagtaggcgtggccaaccgtcaacattttgtttgcccgtcatcgcaccaactggggaataccaaaaaaggtcaaagaggcggagcacgtgtggagcgacagacttctgccggcattttgcttaggcttttatttgaaagaaatgcttaatactttattgtctgttacccagtttgtgttttgaccacatgtgcttggttgtgtactatatcaataatgtgtaaagtcttttaaaaaaatgttgtaatacattgagccactgagcattgttcttatgacgtttttctacaggagaaaaacacaaattacttctaaatactttaaacacttttaacacggactatagtctgtgttagtaaatccaagactagtcatgaaatccaggcatagcactgcatggcaatgcttcagatgactgttctagagcctacagctaatcagtctgtcagattcttgagtgcattacaggcctaaaaaaaaaaagataaattattttaaacaaaacaaatcaaaaatagatatgatatataagtacataatttcactcacctgggaaatggaggccacttgaatggtttgtgagcacagttaattgcacacagcatgccatatcatctgataattgtaagaaataattccaaaagacaactgactgtgtaaagctgcataaaacataaaaataggatgtatatgcagatttcagcagttaatcagctgtaatcagcggaggtgaagtaacagtgacctacctagttgtcactcaagtggccacacccttaattatgcagacctaataaaacctaatataaaggaattttattgttgcccttgttttttcttttaaattcacacccctcagttgtcatgaaggataatagctatatacacctaaattgttctttgtaccgggctgtaaacactttttttttttgcttctgtaaagttggccattttagttgtgggttcattataaatttgctctgtatggagccaggactagtggaattttgatgaatttcacagtttcagttacttccgtactcaatgtcacggacattagatggtctttcatatatcaccttctacagtacagtgttcaatttgaacagtcattttccaactctgcatttcttttgtatgttttttaatgtcatgaaatatgtcttacatttcatttatagtgatcttaaaaaggtctttaaatgtctttcttttgattaagtaaatcttgtagaaagcctgtaactcttttaagagtaaatccttctgattattttcacaggtgcgattgagttggacttgaataagtttccgcgtggggcaaaaacagccaagcagtgctctctagacatggttctcaaagagcatgagctgccaaccatctccatcttcaaacaaaagagagtcaagggctggtggccatttgtggcccaaaatgagaatgatgaatttgagctaacggtgagtttatagaatgttgttaatatctgctgcttgatcatttgttttccagcatatgttgtgctaaaataagtgcattcgtttttgagctcattgatattttacttgtttacagggaaaagtagaggcagagctccatctgttgacagcagaggaggcagagaagagtccagtcggcctggggaggaatgatccggagccacttgagaaaccaaagtaagacatatagatgtttgctctagctcacatggtgcccatctgagaaataatgcagtttcagcttatgaataatatcttatctgatatactgtagataatgaaagtctttgccttaaaacttaacacaaaaatgtaactgaaagataagacataatattgcatgcattatgaggtataaagctgccttgggaaataaaagtagtgcagggtgcctggaggatcttaaatttaggtctcaaaaagtcactgaaattcactgaagtattgggttgtatgtattaaatacttttaaacaggtcttaattttcctctgttcatgtaaagctacccaatcggtacaaccaacaatccatctaaaaacatttaacaaaagtacaattgattaactttacttaccaatatggtttaattatcttccttacatccttacaatgccagttgtttaaaagttctcaatgaattatgcatagttgtatgttgtaaatgaattcggtttaatatagtttttaaaacttgtcatttttaagttatggtaatatataactgtgttttgacacattatttaaaatatgtggctaagaaataacagaatttaaattttaatggggcaagtaaaaaaaaaaaatattcaattggccattccaaaatatcctttgtgttttgtcctgtaaaagtcagaaatttcattcataatggtcttaaaaaaggccttaaatttgacttggggaaacctgcagaaaccctgcagtagttgttagttagttagtaataagtagagtagaagaaagaagaagctgcaattgtgatactactgtacagttcatactgtggttaggggtctgtaatcatcacagttgcatttacagttcttgatcaaacccattaaaacagtaatctactgaaatattatatatatatatatatatatatatatatatatatatatttatatttatatatatatttttttttattttttttttttagcacatttaattcagtgtcaagtgatctttcagaaatcattcttatatgctgatttggtgctattgattaaaccagaatgtatcagcattcatatgttcaaaagagctgatttatttaagtttaattattaaactaattattacatcattgctaaaactaattcttttataaaattggactgacatttgaatctgattcatcaatatttcagaaaataaagttgtaatgtagctaaataaattcacaaaaccctagttttacactgaagcagaaacagacatgcactttacactccatacatggagtattttgggtctacagtctaattatacagccaaagaaagaagacataaagagtctcatataaaagctgtagataattataggtatgacacaaacactgccagatgaaatgggcttaagtcagaagcattttcttccctttctaatattcccactctcctgtttcacatccttccttcctcctgtgcctgccctttcctccgcctacccttcccgttcgtttccttcattccaacctccattcctgttttggaaaaagtcgtccagacaccagtctaatgtggttcatgaaccctctgaggtccatacgatacttcatttggcacaactaccgctggctgatcctgaaggctctggctctgctgctgctccttctcctcgttgggctcttcctctactctattcctggatacctggtcaagaaactcctaggggcttgaggagaaatgggaagaccactggtagcccattctctgtgcctttgttttctttgcttgctgtcttttcagcttttcacagcttttctgagtatatctgtattcttgttactcataccatttttaaaggcccacgatatggatctgagggattgtgggggattcgttgttttccatttagtcacccctctttcatcccatctgttttttaatgcatatctgtgtgtcattttgtgtctcaggtctttgtgcttgtcatttgcctatggttgtctgtttggggctaaagacttgcattttttattatggatttttgagatttgtcattgactgtctgctaatgtgctttctgaacttacatctgttgcctgatctgttcttttactgctaaacccactttaaatttacagtatcatgcaaatatgtggtagtcctaggtgaatgtttttactcaccctcatgtcgttgctaacccgattgacgttttattcttctgtgactcacagtaatcagaagagaatgtcaaagataactttttttgggttgtttaaaagtggacaagctcaaaatatttccaaccctgttttacctgatttaaatgttgtacacttcagtctgacaacagtgcaaatggacaacaaatacaaactggatacctctacatgcaggtctgaaatggtttgagcttgccgactttcaatgactttcagaggttaggttggccacaaaagaccacctactctctgtcaactgacctaatcccctgtgttgtgttaattgattgattgattttatttgacaattttaagaaaaatatacaaacaagtccaattagactaattcataaatactgtattttaaaaactgtcatggatgaaaaaaaaacacatgcttatttccattgtggtccttaatactcttaaaaaatgaacaagcaaatcataaatggagtgcaaacatcatcagctcagcaactcactacaacaaaatcctcaacttcaatcataaaacaacaattttttaatttcccttctaaaaacactctcaaatttaatctctttcaaatttctaggcaattcattttaggcaacgtagttagtgcacaagtgtttcactcttaaatctacaatgataaatatccctgttactcgctcttgtagaatgacagtgtacctcactaactaaaacataataatcaataaaataacttaactttaaaaaaatacttttactacaattttcattatttaaatgggaatttgtgttgaaaattcaataccatctttggtgttttcagtcaaaattgtctggcctttgaatatttgcttacaaactgtttgtaatgttatgttatatcatcaccacatactggattgaactgattgtctgattgatgtatacttgagtttgagtttttaggtgatgaattcattcttagtggataatgtgagattttaattcattttcaaatattttctaagtgatgtttaacagagcaaggaaaatgtttacagtatttcctttcattttttcttctggagaaagtctttatttcttttagttttgctggactagctggacatatagtttcaagtagtcttgaacaccttgataagttgcatacactgtgcttgattcggattggagcaaaactgtgaagggctgcggccctctaggaatcgagtttgagacctatgctgtacagcatgtgaactctcctattcacttcaatggccagtcgctaagctcagaccaatgagatctgggatcctttagttccaataggaaataaaaaaaacctgttctaattgaaaaaaaaaatagctgagaacaaaaaaaaaaattcaaaatgtgctatatttggtttttccaccacaagtgtaacaagctataaattaaaaagtgattcaaaacactttaggagattgttaaataatgtgctaaccagagaagatttcaactttgccgtctgtattctttagtttaatggcaaaatatgacaaaaaagcacaacttcctcctacagtcctgattctaacacagacccacaacagaaatgaaaatggctgctcttcatattgtttatatatgttgtctcgattcaaatttatttgaaaatttctaaatgtcattattggtctttagtggacaaagttagttcatttgtgttcagcagaagaaaataagtcataaaggtaaaaaaaaaaaatactataaaatttttaaaactatcaaatttgatcaagtgttcatacaatgaatgtcgatgggaatgttgttcggatcccatttaaacttcctttatgaacataaaacattttttcaatatcttatgtggtcagcagcagatgaaagttagtcataatggtttgaaactacattttttggggtgcactatgccattaagagcccgtgggctaaagttttcccatggtaaagtcccccccaaccaatcagagaagaaatggaaaaatgatgggtttgattggggtgaatccctcaattagagatcgccatttctaattttacacattcttttgtgtatttgtttaattgcagagctacaaaaaaaactgaaattaaatgtatcaattaaatgtgaatttatcagattttaaagggtcatgaatagcctaaagcactttttttttagatgttgacagatattttgccccccattgaactccattgtgttataaatgagattattataatcatttaatcattattgaaatgattaaagtattatatatatatataatttaaatatttaaatatttttaaattaggaagttaccatggcaactttaatggaacacagtttggtatatttagctttggctcaccaccctcagtcaagtttggtttttgacccttcataagaaaaaaatttgggcacccctgctttaagagatcaggataccatcatcctactaaccactaacatatatattacctctcttcctccatcttccatgtttcaccttccaactcaccacctcctacctaccttcatcacctcttcacatccaataacagccggcccgacaccaccttcctgtggtttctgagcccactgaaggccatccgctacctgatatgcaaccgctacaagtggctcatcatcaagattgtgttggctctgctgctgctgatcatggtgggcctgtttctctacagcatgccaggctatctggtcaagaagctgctcggggcctaaagagagatctgaaacgttagtttgagagattctgatttctcaagcggcccatttcttatttttggttagaatttaaagcacttctttaacttttagaatttagcgtacctcatgttaagcgcaacgtatcaaatatctggactttttaggtatcggtttgcatgtattacccagaaagatcaattatcttgtttgtctttgtatatttaaagaataacaactcatagggagaaaagtaaagcagcaaagtgtctatttttggtacgaaattgaataagctggttgagcattttcacgatttattcatatgaatgcattcagattcaatattttgtcgttttggtctagatgtgtttgtgttgctgctaaaagcacaataagcatgcaaatttgtcttaagaaagatgacttgttcatcagtagctgcagtctgaaaaaaaaatcatgatagggttgcaggcctcgtatagagtatgtaatttgattacattttgccttgatgtttgcactttcagtccctgacacaaatcttctgtactccataatgtttatcctttatagaaacacacagacacaagtagaggaatgatgtctcatttgacattttcaatttaaacaatacgagaatgctctttcttatactccatgctgtggattgtgcttgcggtgtacactagtttgcttgccgtttactattggtctatttaatgaatggtaaactaaccatggatatgtttgcactgattttggcttgtttatataaaagagtgtatttttaattcttgtttacaagtgtgcaatatggattgatttatttatttttgtcagtatgatgacataataaaatgaactcattgaagtaaaaggactgaacgtgattcttgtttctatagtttgagtatgcatgtgtgagagagtttataaccttgttctttttcacacagtcgtccaactaccagcctgtcgtggctgttgagtccgattcgggtgaccagcataatgtgttggcggcagtataagttggtcacagtggtgactctgctcatcataaccgggctgatctttttgggcctcctgttcttttctctgccttcagctttcatgcagaagctcttcaacatctctggatagtcttctgatgccagcacctaatgcccagtcaatatttatcatttatgatttaatggatttaaataaaaggttacatatgaa

SEQ ID NO: 17 - DNA, 103176 bp, Macaca mulatta
  source 1..103176: mol_type = other DNA
  variation 19282..19865: note = a, c, t, g, unknown or other
atcggaggggggtcgggaggaggaggaggaggcagcagcagagaagagagaggcgtgtgagccgcgctccaccagctagctccttcctgctgctcctgcctggcagtgccaggcagctcacaccagcatggccctgctcatccacctcaagacggtctcggagctgcggggcaggggagaccggatcgccaaagtgactttccgaggtagggaagcccctgtcttagagggacgccagctctgagagttggcccggcgcattctctggaggtggccggggatgggacagggctgggaggatgagtgggaaaagttctagcagggcctgggacaatgagccttttcacaggtagtcatctgcctgggactgactggccattgtgatttctggaaaatctcagttccctgtgcttccatgcctgtgtctccttgcgcttgccaacatgccagtgcccaggcagggtgcagagccctctgcctggggaggcagaagtgaggaccacatccctgagctcagggagacccaggaccccctcttcctctctctccctctcctgcaggttgatttccttgagcacagggtaggggccaggtctggagcctgggacacccagggtggccgggagaaaccaggcagccagtagctccctgggccccagagtgatgggggacactgttggcttctcttacatctattcatgggtggggaccctaggaaaccctcacctctcttctgtctggtcttttctcatccttttcactcatgttttcagtgaccatttatcatgatctactgtgtcccaaggataggggtagaaacacagagctgagcccaacccagccccagccccaaggagcctgcatctgttgggcaggcgtgggacaagcagcacaggtatgtgagacagagggtgggggtgagtgcagcatgcatgctacagaagcagcaccctcacccaggctggtgactggtggtcagggaaggcttcccagaggaagcaacactcagttgatacccgagggaccagcaggagggagctaggagaggaggtgaggactaagtagacaggggaaacggtgtgcccagagctgagaggagctgaaactctggaaccgaaagaggttccatgtgtctacagcccagagagtatgcaggagcggaggccagagagccaggcagggcaaggatgcgaggctggacctgaccccgtggacagcggagcccctgagcattttaagtggggaaaggcagggccaggctgactgtgtccttcaccaacccacctctgcctcttcatgtggtcgctccccagccctgggggttggcggtgcttctcactagacacggccccttctcccaagagaggggtctgagagtagtgaagagggggcagagaggaccccaccatactaaagagcgaagtgaaccttggggcccaagctggacacatgtctgcacctctgctggaagggactggagaggccattggcagaacattccagcaagagccctggggcacccacatcacctactcagaggccctgggatgcccacactgcagcttgtgttcatagggacaggcaggggtggaggtgatggcagtggccctgccagcaggaggaggtcaggcagaagggagagggaggtgtgggctgggctgccttttgcctcccaccccaacccactgactgctttctctgcagcaccctggacctccctctgtgtgccacctgctggctcatgctggctttagaaaaagcaaatgtgtcctttcacatgtgaaatgtggccctgagctccatgggcagcatagtgtggggtagttaagctacaggttgccgtcctgctgcagctatgctgagacagtccagtctgcaccggacaggcccatttgcaggcagagaaaccaagactcaggggtagaacactgtgcgtggcattcacagaggggctgaggcacggtggccccagctctcaggatcccatcctgagtactcaatcctgcaagctctttatctcctcctgggccacctgggaggcagcaccttgtctatctgacacccatcttctccttggagcagcgaagggctgggcctttagcctcactcaccaaacaggaattagtctatttgcaacccttgctctctggactgagtggagaaatagtttccaagctccacatcagcaggaggtggccatgggcagagctcccggggaagggggctgggcagcaggaataggcagatgacaagcagtttccagaaagttccttttttacaaccagagatgcctcagccactcacctgcagcgtccagcagttgacagctgtaggcatcccaaaagaccaacaccgaccacaattcagagggaatggacccactctacgacgttccgcagcatctcccagcacacgcaaccactgggggccgagcaggtcctctgcagggggaaacaagaaactggtaaacatgcagaggcagacactggccccaggctccccaaggcttttgagtgaagctcaatgctggggtgggtaagggagcccttggtgagttgtgcccattggcagaggccccaggtaggccagagcaggttgaaatacggcttgaccttctgtgctgtgccatccaggacactaaggaaagagccctgctgggctatcatggaaaaagttctggatatggagtcagaagccctagattctacctgggttctgccacttacttcacccctctgaccctcagtttccttatctgtgaaatgggcatgataataacacgcacctcactagactgcttcagagaaaccataggtatggaagagtttgagggaagagtattcatacagccgatgtgtgtgtgaggcagccattcccgttctccttggcagcagctattggcccctgacatatcttctctccagtccagccttctccccctgtcggccaggagtgagcagagggccccacgtgagatataaagggaagaggagaacacatctgatgggttccagtctgtgccaggagcaggcagattgggcctggcctctgctctataggagcctctgctgagatgttgcgcaggaacccaggcaggcagacccccgacactcctgttctcatctggctgggcgtgcaccagctttgcctgtggccacctcttttcccactgccctcaggtcagtcggccccacgctcaggttcctcagtgctcccagccagttctatatctagctcttagctcttactgcccctggctgctcctaagctggtcctgccctgttagtgcatttcctgaacatgctgatatttgtgcacaggcctgggaccctgaggtgaaggggccaggctggccttccaggagttacaatcccattgggtcagacaggagatagggagtcctgagtgaatctccattgtgcctgcaggccacagggttcagctgggtttcccattaacaaaatggagacagtgatcctcatttagctcagaggcctacagttcccagcagtaatcaggagtgggctgtgtgagaaggagccatcttgaccacaggttgctactcaaagagaggaagtattagcttcaggtatttcctttatcaacacctgagatggttccctacgtcaatgacagagccacagaacgcagggtgtgaggggtcctgaagttcttctagcccaaccttctgtccagtgctgagccccaaggctgagggacctggactgtcagggaaccaactgtcagggaaccaagtgacagactgtccagggccagccctgatgtctcccttctctttccatcccctgagccttctcgccaagacatgaggtttggggattttctgtgtgagacaagaacgtctgaaggctggacctggcttccacataatcccccgtggctgggaattggcatgaaggtttgcagggcatccacctccaccttttcattcctacttctcttcccaccctacccctgattcccaccctgctatgttcccactacattcaacttccagccattcccaaaagataccacacccttttacacctccaagccttgagacatggatcatgtttcttctgcctggaatgaccaccctccaccttgagaaagcccattaattctgctcatccttcaaggcccagctcatatgccacctcctccatgaagccttctcctcctctagcagtacactgcacacattcttcctactgctctgccacagtacattgcatttcagaaactggccacacctctgcatgctgccctaacttttgagcatcttcaagacagacatcagacacggtttctgtctttgcggaattcactgtgtcatgggtttgagttcttccactgtggcactgccactctttggctccatttccccagctgtgagctcccaccccagaactttctatccaaggaggatcaagggactggaagaggcctcaagggccaagaaccaaaaaccctggctcttactccttctatcaactttcctagcccagagaatcttccagggctccaaaggggcctaacaaaatttttttttttttttagacggagtctcgctctgtcaccaggctggagtgcagtgatgtgatctcggctcactgcaacctccgcctcctgggttcaagcgattcttctgcctcagcctctggagtagctgggactacgggtgcccgccaccatgcccgactaatttttgtatttttagtagagacggtgtttcaccatatttcccagccaggtctgtaactcctgacctcatgatctacccgccttggcctcccaaagtgctgggactacaggcgtgagccactgcgcctggtcaggcctcacaaatattagcaagctcagctccagcccacaggtgggaagcgagagggattgcatgtgtaagccagaatgagttaggggaagacggaggaaggagaaaaggcagatgggaagggaggtgggagcagactctgagttggcccctggagcccagaagggaggcaggagtttttattgagcaggggaaatggtcagtatttaagaagccactgaaggatggtagctcattgacaggatcaaaagccgtgaaagggccaggcatggtggctcatgcctctttccgaaccttactgcgaccacacgtggggcaggatctcactgtctgacagaggagaagaaacacacacagaggtgaaatgagtgcagcatacaggagggccaggggtgggggtaaatcacaataatgtttagaggatgacagcttacttagagctacagagaccagggaataggagcaggaagaggagcaggaggaagtgcctaagctgggtcttgaaaaactgcccctgtttgcccccatggagatgcaggaagtgaggaattggtgatgaaggaaggtgaagtcattctgggtgagggactgaccagaccagaggctagaggaggggaattgcagccaagttccatgtcggggaaatcacaccatgtagctggagcagaggctataggaagtggtagagggagaccagctaggaaaggagcagtgggcctgctgagtgattgtacagggaagggttgcagctgaggcactggggacaagatttccccctactgttggctgcaggcgccacctccgactccacgttagatttattttccccagtaaaatgagggagcgctccctcttgatgaaaaatacagctactatttggaaacttatctgccgcccctgatgaaggaggcagaatacccagtgcacccacccctgagatgctcctgcaatgcctaggcctgtctgtgggctgtagtccagcctagcaccccctctcttggagaatgtggggtaggcattgtccctgctgaaggcggcaatagaggggacccttacaacgatcttggcagcctgtggctggctgtggacatagccctgtgctttgcccctcctccctcccccagagcaagccattgcacaccagcgaacagcagacagagcacacagaaaattccccaggcttctcctgctttgataggaagagtgtgctttcatgtaatgaaaatgattgtaaaactgtcttctgctgcaaaagccctcaggaaaatgctgctgggaatgtgctgagaacagacttgcaaatcatttctctgaattgggaagtcttggttatcttagccacctttaccgaccatgtgaaagccacatctctcccacccactcccatccctgggtctcattttattttatttttttttctgtcgcccaggctggactgcagtgacacaatcatggttcactgtaacctcaacctcctgggttcaggcgatgctcccacctcagcctcctgagtagctgggactacaggcacacaccaccatgctcagctaatttttgtatttttagtagggatggggtttcaccatattgcccaggctggtcttgaactcctgctcaagtgatctgcctgcctcagccctcccaaagtgctgggattataggtgtaagtcactgcacccggccttatcttcttttttttttttaacttttatatatatgttaaaaaaaaaaaccttaaatatatacaagagtggggagaacagtatcatggccctatgttgtcccatccaattttagctatcatcaattcacggccaatcttgcttcatttgcatcccatgatcctacttccccaccccaaattattttgaagaaaatcccaaaccccataccattccatctgtaaatattcagtacatagctataaaagataagaactcaaataaatatcacatactttgtcattttaaagaaattaataacaattccttagtactatcaactaatcaggcagtgatcaaattcctaattgtctcatcaatgtcataatttttttccaatttattaaaatcttcattttaacatgttttgtaaatcaggcatttaatcatttattcactgattctgttgaagggcagccatgtgccaggcactgggggacagtggggaatgagacagacgtggctcctgtcctcaaagggggaagatgatggctgcacccatcatgaggagcattatgggaagggaggcacaggtgcccaggcagttcgtggcaaggaaatccacttagcccaggaagccaggaagccaccccagtgggtgagccagagtcagttaggggaagaccgaggaaggaggaagggcagatgggaagggaaataggagcaggctcccaggtggcccctaatgcccagaagtgagtcaggagtttttactgaacagtgggaatgggcagtatttaagaagcccttgaaggatcgcagctcgttggcaggaacaaaggccatgaaagggctggatgcggtggcccacgcctgtaatcctagccctttgggaggccaaggctaggggatcacttgaggccaggagttcaagaccagcctggccaacatggtgaaacccccctctactaaaaatacaaaagttatccaagcatggtgggtgcacgcctgtaatcccagctactcaggaggccgaggcaggagaattggttgaacccaggaggcggagcttgcagtgagccaagatcacgccactgcactgcagcctgggcgacagagcaagactccgtctcaaaaaaaaaaaaaaaaaaaaaaaagccatgaaaggctccatcccaggcagaggggctaacactagttaacattagtgcagacttgctggtgtagagatgcatcaggggagtgtggagaggaggctggaaggcagggcatgggggactcagccaaacacagagggtctttggtgtcacactagagacactcttagcaggagaatgggatgctaagatattgttttggagagaatactctagatgtgaggactgtgggcagggatgcttgggaggaagcccagggcaggcggagggcagagagcctcagcaggtgggcatgagagaggaaggagcagcgctgggatcaggggagtgagtgagagggcaggacaagggtacctcaggacaggagtaaattgtggccctggggaccaccgtggacccagggatttggggtactgggccttagttgattctcctctagactcctgccagttgctgacactctgaattctggcaaacatggagacatcagagtgaaaacacctggagccattgccatccaggtgggcgcctcgagggcaggcgccttggctgctttcccagcggcagcatggggcctggcacagaacagacctgacacagaagtgggagcaaggagcaccgcctgtgggtgcaggcgcagtgatcagttagcaacaggggcccccatgcagcctgccatccaggcagcgccaggcagtgatccatttctcttggtgacagccctagaaaaggctcctgagacatggaccatcatgtgatcatttttaccctagacctgtctgaactcatccacctgctagatgctgcctcaacagtcctcgtttctattttattttcttttatttcatagcagaagggctaatctgctgaggtggagatcagttttcacccactggctttttttttttttttttcagccaaagtttaagaaaaagtcaggaaggactgcagtttcaacaatatttttaccctatcggagtaaaagagtcaccctcccattataactcattgtattcccagtgcctgacgcagaaagggtactctacacacttgtggatcactgggaccacaagctctcctgtcacagtaacaggggaatctcggacccagcagttgcttactgtgtgggtggcactgtccaaggctcaaagacaaataccacaggcccttcctgcctcagtgccagggtctgaaaaataggaaccagtgctctcagtcagttgcagggcaaagtcagaatctgagtgaggacctggaagaagggtttgagctgagccagagagatgggatttatcatccctgctcaccccctgcctctcagatgaatccctgacccaagcctaagtttccatagtgtaaacctggatgctagcagggtgggtcaaggggaaatacatgagtggaggtagaaatgatatttgagtacaattgtgtaaaataaaaggttagagttccatggggcctccatttagcagggaaatggggaaaatggaaggggtaacctccagtgtgaggcccagggactctgcagtaccaaagtctggctctgtgagtcattggtgattttcagagagtacactatgtaagaaatgtgaggaatagctgctttcttggacaactctttgaattgaatttctttctgttaccctgccatcaactgtcattataaaattgaaaatgtgtttctcatggggaaaaaaagtgttattacaagagataatcacaaacaactagacaggaaaatcacaccaccgtcaaccaccttgatgtaactggcatttctagaacattacacacccaaaactgaaaaatatacattcttcttaaatgcacctagaacactcaccaagacagaccatatgctgggcaattagacaagtctcaatacatttcaaaagactgaaatcttacagagtgtgttctctgaccatagtgaaattcaactaaaaatcaataataagaagatatctttgaaagttccaaatatttggaaattaatacccttcttaacctatggtcaaagaaggaaagaaaagagaaattatcaaacattttaaactgaattataatgaaaatacaacatattaacatttatcattttaagtacttctagcagaaaagaagtgtgaagttgtaatctaggtttctgctttaaaaaggtaccaaaagaaaagcaaattaaacccaaaccttgaaaacattatgttaaatgaaagaagccagacacaaaagatcacactgtataatctcatttacagtcaggcatcgcttaatgataagagtatgttctgcgaaatgcatcgttaagtgattccgtcattgtgtgaacatcatagagtgtacttacacaaacctagatggtctagccaactacacacctagactatatggtatgacctactgctcccaggccaccaatgtgtacagaatgtaactgtattcaatgctgtaggcaattatagtacaatggtaagtatttgtgtatctaactaaacatagaaaaggtacagtaaatacaatattataatcttatgggaccactgttgtatatgcaagtggtcatctgactgaaacagtgttatgtgatgcaagaatgtatatgaaatgctcagaacagacaaatccatacagacagaggagattcgttgttgtcaagggctgcggggagggagaatggggagtggctgctcacagatgtggagtctccttccagggtgatgaaaatattctggaattaggtagtgggaatgggtgcataaccttgggaatatactaaaaactactgaactgtacgctttagaaggatgactgttatggaatgtgattatatttcaataaataaaaatcaaacatccccgccaaattaaactcaaagggagtataaaaggaaggaaatagaaaatagacaacagagaaatttaacaaagccaaaagttggttctttgaaaaaaattaacaaaatagataaaccctaggaaggcttatcaaaagtaaaaaagcaagaaaacacaaagttccaatttcgggaataaaagagggaatatcatcacattaaaagaaaaataagggaatattacaaataacttatctccataaattctacaactcagatgaaatgaataaatcctttgaaaaacaacttaccaaaactgacataaaaagaaatgggaaatctgaagagcctccatacctattaaagaaattgaatttctaataacaatgatgatgatgacgataaccttcctgccacaaagaaaacttcagatctagattatttcactgccgtattgtagaaaatattttttttttctttttttaagacggagtctcacactgtcgcccaggctggagcgcagtggtgcaacctcagctcactgcaacctgtgtcttcccagttcaagcgattctcctgcctcagcctcccgagtagagtagctgggactacaggcacgtgccaccatgtccggctaatttttgtattttagtaaaggcggagtttcaccatgttggccaggctaatctcgaactcctgacctcaagtgatctgcccacgttggcctccccaaagtgctgggattacaggcatgagccaccacacctgacctgtagaaaacatttaaggggaaacgtaataacaaccttacacaaactctttcagaaaatagagaaggaagagcacatctcaattcattttatattatcaacacctgacaaagaccttacacaataagaaaattacagcccgatatctctcatgaatacagatgtaaaaatccttaacaaaatattagccaactgaatagcaatatatgaaaaggataacacatcatgacaagtgagtattatcccaggaatgcaaggttcatttaaaattagaaaatcaaaatattttaccatattaacacagtaaaggaaaaaattcatgattatatcaatagatacagaaaatgcatttgacaaaattaaacacccattcatgataataactatcagcaaactaccaataaaaagagcttcctcaatctgataaaaaacatccagctaacattatacttaattcagaaatattgaacattaagatcatgagtcaggcaaagttttctactctcaccacttctattcaacactgtactagaattctagccagcacaaggtggcaaggaaaaaaacaactcctattgcttttttttggaaaggaagaagtaaaactttctttattcacagaaaacctaattggttatgtagaaaatcctaaggaatctattaaaaagctactataattaatgagtgaatttagcaagtttttaggatatatgattaatacacaagaaaataaattttaccaaagatgggaaagacttccaccctaaaaacaaaacagaacaaaatgctgagggaaatattaaaaaaaaaaaaaagtgtagaaaatagattatgtttatggactgaagattcagaattgttaagacgacaattctccacaaaatgacctataagctgaacacaatcctgataaaaatcacaacagactattttgtagaaattgaaaacattttaaaatttatatggacatacaaatgatacagaatagctaaagcaaccttgaaaatggagaagagagttgcagtgttcacaccacagctgacccctgaacaacatggatttgaactgcgagggtccacttatatgtggattttcttcttgcctccaccacccctgagacagcaagaccaacccctcctcttcctcagcctacacaacatgaagatcacgaggatgaagacctttatgatgacccatttccacctaaagaatagtaaatatattttctctctctctctttttttttttttttttttgtttgtttttgagacagggttttactctggttgcccaggctggagtacaatggtgtgatctcagctcactgcaacctctgcctcctgtgttcaagcaattctccttcctcagcctcccaagtagctgggattacaagcaagcaccacctcactcagctaatttttgtattcttagtagagacaaggtttcaccatgttggtcaggctggtctcaaactcctgacttcaagtgatccacccgcctcggcctcctaaagtgctgggattacaggcatgagccactgcgcccagccatattttctcttccttatcttttttataacattttattttctctatcttactttattgtaaaaatacagtacataatacacataaaaaatatgtgttaattggctgtttatgttatcattaaggcttctggttaacagtaggctgttagtagctaagtttgggggagtcaaaagttatacacagcttttcaactatatgaggggctggtacctctaatccctatgttgttcaagggtcaactgtatttaattataagtctaactataaagttacaggaatcaagaaagtgtgacattggtctaagaatagacgtatagaccaatggagcagaacacagtgtccagaaataaaccctatacatataaaatcaattgattttcaatcaaagtgttggatatctagaactagatatctatatggagaaaaaatgaacttcaaactcctacctcattccacccacaaaaattaatttaagatggattatagaattaaacatttaaaaactataagcttctagaagaaaatatagaacatctttgttatatttttgggttagacaaaggtttcttaaagaaaaatttaaaaacactaaacataagaaataaatttcactaaaaacttgcatttcttaaaaattggaaactctttggctagtcacagagtaaaaaaaaattgaaaactcctattcattaaaaaatcacatttaagaaggcatgagaaggcaagtcacacacaggaagaaaatattcacatttatctgacaaaggacttgtagccagaacatataaagaacccctacaagtcaataataataagacaaatgatgaaattttttatataggcaaaagacttgaacagacactccatagaataagataaccatatggccaacaaatatgtaaaaatgtgatcaacatcctaattcattagagaaatgaagattaaaattacgaagagatactatttcacatgctctaaaatagctaaaatgtaaaagtctgacagtattcaaatgttgatgaggatgtggaacaactggaaattttttacattgctgataagagtgtgaaatgatacagcagtccctttggaaaactatttggcaattttttcttttcttttcttttttttttttttttgagatgggagtcttgctgtgtcacccaggctggagtgcagtggtgccatttcggctcactgcaacctccgccttccacatttgagcgattctcctgcctcagcctcctgagtagctatgactacaggtgcgcgccaccgtggctggctaaaattttttgtatttttagtagagggggggtttcaccgtgttagccgtgatggtctccatctcctgacctcgtgatccgcccgcctcagcctcccaaagtgctgggattacaggctgagccactgcgcccggccagcaatttcttataaagctaagggtacctatcctgtgacataaccattctgttcttaggaatttcctcaaaagaaataaaattatgtttccacaaaaggactcacatgaatgtttacagcaactttactcatatagcccaaccctggaagcaaccccaaagtttgtcatcaacagagaaatggaccagcaagttgtggtatatgcatacaacaggctattactctacaataaaaatcaatacattacttatatatgcgacaacatggatgaatcacaaaaacattgcatttaccaaaagaagccagacacacaaaaagtacattctgtaggataccatttatatgaagtttaaaacaggcaaactgatctttggtgctagaaatcagagcactggttactagggcactagaaatcgactggaaagggacatgagagaatatgtggagcaaatggaaatgttctatgtcttgattgtgtggcagttatacagggaaatgcatttattaaaactcattgaattttacacttaagatctatgaatgtaagtttcacctagttttaaaaaaagaagagataatcacacctaaaatacctaaaacttgaaaaatattatataagatgaggaaaaaaagttatttctgattacatgctactaaaaataagctgcaaatgtgattcgtaatagaagaagtcatttttatatttagcacgtaacttaaaggtctaaaggagaagcgagctgggcgcagaggctcacgcctataatcccagcactttgggaggccaaggagggaggatcacttaaagtcaggaattcgagatccaagtggccacagggtgaaaccctgtctctactaaaaatacaaaaaaagttagccaggcgtggtggcgcacgcctgtaattccagctacttgggaggctgaggcaggagaatggcttgaaccgaggaggtggaggttgcagtgagcggagatcacgacattgcactccagcctgggtgacggagcaagtctctgtctcaaaaataaataaataaataaataaataaataaataaataaataaaaggagaaaccagactatttagtagactgagaatagctatttcttattgagggacaaacttcaccagatgctattgtaagcattattatttccttcattttaggggtgaggaaaccagggcaaagagaagttaattagcttcatccagggtatgctaactaggaagaggtagctgggatttgaactcagggactctggtccaagagccttaacctctatcctatgctccctcatgcttgtaagggacttgatgctttacttagactttcccacaacagtttcttgtcatcctcgcgatggtcccaagacataggctggtccaggataatgacccccagcttacaactgatgactctgagaccccaaggggttggaaggccagctcccaggcccccagcccatgggccgttgtgccaggctgcacacctgagtgggcctggctctttttcctgcacgcaggggtgcgtgggccctgcttcctggtgctccatgggagtatctggccttcaaaaggaacagattgatctgaagtggggagagaaaaaatacagcaggaccaccactcagagagccgctgtagaggaagagcgggagaggagacgccaggacatgggagcgtcacgggagagaatgggactgtttgctgagctctgtacagcccagcccaggcagcacatacaacaaggctttgatgattttaaataacgcgaggaaatagcagctccaggtttgagtcaccagcagagttttactctgtttctcagttcacacagggacaacacaatggcaggcactgcgggagacaggccagtgggctggccctggcaaaatcatgaattcgttgaaaacagtctcaggaaccttctccttcccccttcagatggcccaccacctcaccctctgcccttttgggaccccagcccctctccagtcttgcttccacaggctgctccctgagggcagaccatttttgcttttcccttcgccgtcaggactccccgtcctgtgtccagctccttggggctccattctctgctccatgcttcaaacatttccttacactgttctctgtgcctggatttcccgccttctccttgctccccagtctgtctgaatatccagatttttctcgtcttccagtgtcaatgcctgtgcctctacaatgcctccttaatccgttatgttgagagtcattgctcctttttctgggttttcactttatttacactttttgcatgccaatgaacaaaattctgccttatatacatcagcagaattttccatgtctgacatatctccctctggattgtaaataaatgctcttaaaggcatcgttcagattcgaatggtctttgtacaactcccctctgtgaaggccaaatggcacacaagccaggagcaagaaagccccggttgcctgtggaaatgaatgaacatacatgggctggcagccatgtgcctgcatacctgccttttctcagatgcgtggccctagcagggtaagctgtctggaagagggagctattttgtgcagatggaatattttgtccccttaaatcaagtcccatgaaaggccagcatgccatcctgcttctgaaacaagcactgagctcgtctccatttaggagaagagctgccgcgtggatatttttaagtggtgaatggagaaatgggtatatctgataccatggcgcttgttacactttgagcagactctgctattcatactccatctattgactcagggaggagtttatttcaaaccaaacagctcagctatcccagaagcagctgcctcagaaggaaggaggatgctgtcctattttccccatctaacctccttctcactcaatccacaacagcctttccatgtaaagaagaggctattttctttcaagctttattctccatcttctctgtggcaagaaaggtgattggatattgggatttttaatggttttgtctgaaagccatttaaaatgaagctggaatgtcaacaagactgacgttgaatggagtagatgttaagtggaaatgaacttgaaacaagagatggagttagtcattcccctgatcacttggaacagatgatggaggtcccctggctctgctccagggaacagaacagaaccacttgaatactgccagccactgtttgtacataccctcctgaaatggctcatccaaaatgctgaaggacattttgttttcttaataatttggcctttccactgtttctatatgattgatgtgtttcagcaaaccttttttaaaaaagaatagctagaggtaaatttagctcatcctgtttgaaaatattcaccatctctaaatccccagggcctaaatcaatgaggttttagcacatttcgacacagagccctgatgtataaattctgcagtggctaatttcacatattttacttcctctctaacaaagctatggacaaatgcacaagcaggggagggtttgagccttggtgcttcctgtagatgatgtgaatctgacaccatcttggagcagggcccctccccaacgtctcccaatcctctgctgggttgctcggtttttcactccaagagaccctggaggacagctatatctgaggctcattaaaatcttctaggatgaaaaggtctttgattattcagagcagcaggtctttaggtgaaggccttatacacaaacatgctcacctgattctcaatttatattgtgtgttacctgtggggaaaattaaaaactcaaacctcaggcactttccctctcctcccttggttgcccgggggcttgctgttgagatatttcttgttgattgtttttttttttttatgtccctggctagtgctaaagattatttctttcccatcttgtttacttcacatctcttttctttatagatagcctctgctttgcggcatggctttttgctccttatctcagatgcagccagcccttccccacttacccccaccccaaaacacacacacacgaacacacaccctttcggagtggatccacactccccatttcagtggatctgacatcaacgacccctccattcccagccctccttgtcagaggggagctctgcattgaactaggactagctcctgggtcataaaagctgctgggaccctggagagctcttattaaacagataaggccaccaacgccagaggagagaggtcaattcctggagggaacaagcctgttttgctgagccccgttccttgcccagcccctagacccatcacagggaaggttcagaggacctctgacccctccagtacctccttgtcctggcgccactctagcctggtctcccaggttttctgtagggagaggagcatagtccgctccccccatgccatggtctccaacattgacaacccaaactaacccccaaataggaatggcttcaacctggagagagtccttcaatgaaatggtttatactggtggatatttaaaggtatttgtctttcagctgggtgcggtgactcacacctataatccaagcactttgggaggccgaggtgggcgatcacttgcggccaggagttcgagaccagcctgaccaacatggcgaaaccccatctctactaaaagtaaaaaaactagctaggcacggtggcgcatgcctgtaatcccagctactcgggaggctgagacacgagaatcacttgaacccaggaggcagaggttgcactgagccgagattgcaccaccgcactccagcctgggtgacagagcgagactccatctcaagacaaacaaacaaaaaaaggcatttgtctttcaattactaaaagcaagcatggttactggaaaaaaattcaaattcacatgtatttatttatttatttatttgtctttcagccaggtgtggtggctcgcatcaaagcatgctgctttccgtaccttctcactctccctccccagggataaccactttctttcttttttattttatttatttatnnnnnnnnnnnnnnnnnnnnnnnnnnnnnnnnnnnnnnnnnnnnnnnnnnnnnnnnnnnnnnnnnnnnnnnnnnnnnnnnnnnnnnnnnnnnnnnnnnnnnnnnnnnnnnnnnnnnnnnnnnnnnnnnnnnnnnnnnnnnnnnnnnnnnnnnnnnnnnnnnnnnnnnnnnnnnnnnnnnnnnnnnnnnnnnnnnnnnnnnnnnnnnnnnnnnnnnnnnnnnnnnnnnnnnnnnnnnnnnnnnnnnnnnnnnnnnnnnnnnnnnnnnnnnnnnnnnnnnnnnnnnnnnnnnnnnnnnnnnnnnnnnnnnnnnnnnnnnnnnnnnnnnnnnnnnnnnnnnnnnnnnnnnnnnnnnnnnnnnnnnnnnnnnnnnnnnnnnnnnnnnnnnnnnnnnnnnnnnnnnnnnnnnnnnnnnnnnnnnnnnnnnnnnnnnnnnnnnnnnnnnnnnnnnnnnnnnnnnnnnnnnnnnnnnnnnnnnnnnnnnnnnnnnnnnnnnnnnnnnnnnnnnnnnnnnnnnnnnnnnnnnnnnnnnnnnnnnnnnnnnnnnnnnnnnnnnnnnnnnnnnnnnnnnnnnnnnnnnnnnnnntctttaactcatcctatctctaggtttcgcctcacagaaattacagtcccttctcttgtggttccatcccacccctaaaacagtatgtatcctcccttctctgtaccattactgtttcttgtgcaaaattgtgccttggagtatgtactgaatggtgttgcactggaggcctggtgcgatgacccatgcctgtaatcccagcactttgggagaccaaggcgggcgggtcatttgaggtcaagagttccagatgagcctggccaacatggtgaaaccctgtctctactgaaaatacaaaaattagctgggcatggtggcaggcgcctataatcccagctactcaggaggctgaggcaggagaatcacttgaacccaggaggcagaggttgcagtcagccgagatcttgccactacactccagcctggggacagggcgagactccatctcaaaaaaaaaaaaaaaaaaaaaaaaaaaaggtatttcccttgtactagtgccctgttgcttggctcctggcctcccttctagaccatcagctccctgtgggtgggagcttgtgcctttgtcattggtccatcctctattccgaggccccgggacatggcctggaacatcagagactccagcggctacttctcaaagtgaactgaattagctggtgtttcccacacattggagccccttcaacctgccctcgattctctcctgacttatttctccccacatcttgggccagttccaactggactagcaaagagggcagctttccctctgtcctcccatcatgccctactgggtggcatacggatgggggagcctgggatgatgggtgtccatctcatacacgctctacttcccgtgccagtggggaaagtgggggcaggaatagagcccaggaggaaactgccagagaccgtcttctctgctaaggctgacaggaagatggaaaaccatgacagtggtggaaggggaaagcccttgtcccacagggaataactctgggatctgacttggttttggggacctggtttgggcaggagcccctggggtggctgcagaaggaagctgggcttcacagacccccatcagcaggcaggggctacaccctctgtaccaggtttctactcagggcagcagggccgggagttaccaccagagctggggaggctgcagaggaggctgagagatccacgggggaagagcgtggtggagaatagctcctggggtcctcttccacggccactctgaccagcctgggccctctgtgccttaggattcccgttcctaatatggaactcatggcctttgaccggcttccctcacgggactgctgagagggtcagagaagaggccgcatggggactggcctcaccctgggagaactgtgcaagccaggaggtcccatgttgcatgacaagtcaaatgctgtcaggacgactcccaagatgaggaggtctgagcccacgctggtggtatggacaggtctgaccctagaatttatttcctctttccctgcagggcaatccttctactcccgggtcctggagaactgtgaggatgtggctgactttgacgaggtaggaggcccaagaccaccccctccctcagccctgagcccagaggggagcaagcacccttcactgcctcttgtgggcacacactggccccaaatcccaggcgccagcctgctctgagcacctcacctctcagctgcttcctgaaggaggtggtgaggaggggaagagcagccttgcccacctcgacagccctgccaggtctgggcctattattccctgtggagaaagagcccacaggtgctgtagacctgaatgtgagccaccagctgagggcccaacaaggcaggcgagtgttggggacatcgcaaaggccaatctgtgtcagtcctcaagggttgaagagcagggcagccccaggcactgaggtgggagccccggtcaccagggaaacattgtcaagcaccccacctgagtcagggcgccatctccagaccttgaggggaaacatggggaagagaagacagtctggattttcagcaacaactctgggggtgccatgagaaaagacgtgagctgctggtctattgacaacgatttttctcaatcctcactccagctgggctgttgtcacaattttatcagcaaaggagtaggcgacaccatcccacgggagtgtctgggagcggtgagaggacttaacaatgcttccctctccctgcccgtcccctcggcacctggcctgtctgggagccccatccttacacacacataccagttcaagcagcccgcggcctcctcggcctcctcacattctttcatctatttgtttgctgcttccagaatctatattcccctctggctgctgtagtttctccagggttgactttggggtgaggaccagcagccattcatcaccatcttggccaaactggaagctccatggtgaccctcaaatagtgtacccccatcgcctgggcttggctctcctgcttggctctgtgggggctgggaagggccttatggcagactgtacctcttgaggttggctgctggcgttcggctgagcagccaccaggctgacacttggcaccagctgtctccctccctctgaaaccgggccacatgatgtggctgtgtccatcgacccagagctggagacacagggagcaaagcctcgttcctcactcaggctcagacacagccatcaaccgtcgcggcccagcaccacgccctccccaaccactgtggggcgcagttgccactacctccctggtacatccctactgctacgcaagacaggtgaattgctcatttaaagtgaatcactagagctagggaagtttctgtccttaccttctccccctcctggttgtacaatgacctcggtttctaaacccgccaccatctttgtcaaatgggattggtgatgggtgtgaaggtctctgtaaaatgattaacaaaatgaagggttatggtgagagtggaaccatggctgcccactgagacagcagtcatagaggcttcaggcttgccgcattatacacccggtctgctccctcccctccccattttctcagtcagggcactgggctggctgggtgaagattccagcagcctggcccagtttcccatagtcctacctccctgggcttctgcccactaatctaccaggcacagcatctgactccctcctcccaagactcccaggggacatgtcagcccaggcatccagccagggggcaacctgatgccccttccaagggcactgccacccctttccatgcccagcgccccggacacctgagccacaggtatgcatgacattcaaagttaatcaccgtgtccttcctcttcccaactctacccaacccgcctcagggggagagtctgtctctgctggccctgaacaagaggccacattctgagcatctaatgaatgccagcctgggcttgagatactccagagggaggaacctgggctcaacaccctgtgatgatctgtatgggagcttagggatggggtagccagagtccgtgtggagagactggggcggggcagaagccaggcatttatgggaagaagcatgtgactaaggtcagagagcagggcacgcgatggggagaagtggctccgacctggggaaagtgctgcacgcccactggggagacaggcgagtttctggctgtcacaatgaggaacctgctggcatttagtgaggtggggagcaaggatgtaaaatgacttgcaacactcaggccatcccgcacttcccaccagggagccccgtgggaagatggtggcagccccagaagcagccctgagctgcttcctgagccatgccccttccactcaatctctgaaataatccacagatgaaatcaggctcggatggtaactacccttccccaggtgacagagctggaagcggccaagccagggctctgaattcttgcgtagatgagacctaagccctctctggatacagtgatagggcctgactcccaccacctctgcaaggcctgtgtggaagtctctccacgccccctaccgccatttctccccgtgcgaagtggctgcagccctggccaccactggtcagcagtgcacatcccacgaagcaggaaggccaccctcccatcccctgttcaggaagggcccggaggcctgggtcagcccaatcccaaagatagcctggaaccgtaccctggctttaacctctctctctagacccagtgggtaagtcgtaaacttccctggcatctccctgaaagaacctgcctgccagtggttccagaatatcctgggaaagaggccctttcaaatcccccaaaagcctcttgactttccagaaagcctcttctctccgcctgactctgcccagggcctgcaggagccagcttagcgagactcagtggcctgggagtcatgagacctgcaccacagtccttgctgaggaacctctttgggccttgcattccccttctgtaacagagggatatgctccctgctctacctgcccccacgggactgtcacaaggctaaaaaaaatgaaatgacagacaagaaagcaaatgtctctcacagctctactaggtaagggattccaagcaagggaggggcccctcctctgctcaggcatgggtgagaggggctgcagcagctgggcttaggaacctgagtggggaggaggaagccatggaagaaagacaatgctctctacaacaatgggtggaaacagagcctggacatggtgtctcctttcccagaggctggaacctgagctcctacatttaacctacaacaccggaaaagctatggagagacagagaaagacccagcctttgtgccctggggaagcaggagtagccacctttagccagtttgctttggctctaacacaggccctgtgtggaccaggccccaggggagaggccagagtaacaatagtacttggagcaatgataagaactgctgctgtttactgagcacttagtgtgtggcaagatgggttgagagctttacacaagcattagactctctagaacttgctgggctggtcacatcctaggtgataaggagccacaccaggatttaaacccaagtctatctgattccaggacctgtggtcatttgcaaagtagacaagattcagccctgccctcaaggggctcagtctggtgggcagatggacccactaccaacaaggagggaccctgggccttctgagcccagaggaggaagaggtcaccagcctgggggatgacagggcaggggagtttggcattatctgcccctttctgcttgtccctggaagtcatgggctgttacgtcctggaggccagaaacgcacctgtcttgttcatcattggcctggcacccagcatggagctcagaaaatgttgccgagtgaaagaatgaacaaaacagtgatattcactaggactggcacctgtcaccacaggtctgtgcccagaccaagtgggctcagcagggctagtggtacatcaagccctttgctgtggcctggatagaaaggaagcagtcaaggcacagacgagatcacctaaggggactttagatcaccttgatctctaaggttagagatcatctagtttaaccctcttgtcttgcacttgaagaaacaggtcttagaatggggaagagaattgcccaagaagaccagctgagatctgagatcctacatttaacgtacaactctgaagaagctggggaaagagacagagacaaagacagaaacagagagagagacagagagagactcagcctttgtgtcctgggaaagtgaaaaagccacactagggagactgagcccaggtctttaagctcgcaaatctgtctctttcccacgatactctaaagcagcagtccccaactttctggcaccagggaccggtttcatggaagacaatttttccacagactgggatggtggtggccgggggtgatttggggatgaaactgttcctcttcagaacatcaggcattaggttcttttagggagtgcacagcctagatccctggcatgtgcagttcacagtggggttcacattcctatcggaatcaaatgctgtccctgatctgacattaggtggaactcaggcgagaatactcgctcactcgccgctcacctcttgctgtgcggctccgttcctaacaggccatggactggtaccggtccatggcccggggtttggggacccctgctctaaagctttgtagtgcatctcaatattttcccccaaacctacaaccctgtccctttaaggatgctaccttgctgatttaggatggttccaggcccagtcaggggccaagctggacataatccaggtcattctccaaagtgcatcagggaaaccttttctgcagagtcctagatcactggggctgataggatgcagaaccttgtgccctggccagcaccagccaggtcagggctaagcctagaccagaaaactgggtcaggattcagcactcccagggctcctgagaccgcccccgcaacagaggccctctttccctccctatctgtactacctaccgtcttgcttctgtcaacagtcttatcccaggctgctattccgggtcagtgtctgtctccagaactatccagtactatccccaggactgagaaacaacctgcatccctgtgctctgcacagcgtcatgcacagagcctggcacacagcaagtactcggcaaatgttcgcccccagcacggggcttgctggctcgtgacatcttgagtgactatgtttggcttaactgcccagcagtaccaggcttcaggagagggttcagtgtagtggattaagccctaaggcagaactccagactaagcattctgagacttgaatttgaatcttgcctctgccaccaagcagccttgtgcccctgggcaactctgctttcccacttgtaaaaggagcacatctttgccatgttgctgtgagtttggttatgggtaaaaggtgctctggaagtactaagtgctacccagatgaaattcttccttcagaagccctttccttcaatcttttttttttttttttttttttttgaggcggagtcttgctctgtcacccaggctggagtgcagtggcgccatcttggctcactgcaacctctgccttctgggttcaagcgattctcctgcctcagcctcccaagtagctgatattacagatatgcaccacccacccggctaatttttgtattttagtagaggcagggttttaccatgttggccaggctagtctcaaactcctgacctcaaatgatctgcccacctcggcctcccaaaatgctgggattgcaggtatgagccactgcacccagccccctttccttcaatctagtagctcataaattcaatggcagagtcaggagaggagtgtggctcccaaaccctcaaagtcctcatctcgtcttgctgtgttctcagcatgtcaccccaaatggaggaaaggacataaccacaaaaatgaggagacaatgaaaactgaaattaggaagagaagaagcagtgaaagagacatgtgaaatccacaggccgaggcagaaaaggaaagtgatgggggcgagggggagggaggtggcatgacagggagacgggacagctgcagacctgcacagagttcccactgggaaaatctaaaccaaaagcgttctgcagtgctgtgtcgcttatgactgctgtcacctgtgagatctcattcaattctctcaatagccctctaaggtagatattgtcaccccccatttcacagatggggaagctgaggcacagctagtgagtggcagagccagggctagaactcaagtctcctgactcaaacttagagttcctacaacaccacggagactcccagtctgcatgagatacaagcctcaatgttgtcagaagaacaaaaagaagcaaagggtgggcatgtcctttggagctctgtaaggtacccagagctcacagacgctgcctgagcaaaataaggtgtcagcaatgggagatggggctggcaatgctgtctgggcacagcaagggggtctctgggtgctgggaaagggaatccccacctctttcagggagctgtggaggagccgttgaaaagttttaacaaaggagagatgataagagaggaaaattcaacccaaaaagtctccttcttacagcccatgcctctgcttgtagggaggccaaatgggagaaacccccagtcccagaccctgagtcacttccctctagccgggaggcccatcaccctccgaggccccacactgatgccaggaccccacctagaggtgccggcttgacccgtctctaggcctgggccttgggatttttaaaagcttctggaatggattccaattccagttcttccagatgaagaacccctaagagagacagagggagacagagacaaaggaagagatagagacagagagagaaactgatgaaagagaaaatggatgtggtgaggagaagaaagcacaggaacgacgcgggagggtaggaaaagagaaatgaggggaaagcctcttgtgggtggaaaatgtgggagggagacaggggaggaaagagaggtatctgtaaagcacggagcaagtcagagactgaagaagctgctgtgattcagtgaggaccctgtcttctccctcgcccagaaagcctccaagaagaactttcccctctgacgtcttcagggactgcccagacctggctgatgagttcctgaaagggcacctgagccacacacctacacacgcttccctgattattctcatctgcagtcaggggcccttctggaagctccctctctcctggaccctccctgacacccaactctcactcaacaaactggtccttgccccccagccaggcagtctccctccccaggtcccttagcctcagcctccggccaccattcaacacccgccatccatttcacagggccatctccaaggtcatgtcctttattcctgatctttctctccttccaatgccaaaatcccacccacagaccctcagggggttgaatcactcctccccgcttcatcaccagtaaaccgaatctcggcggctcctgcggccccccactcccacacagcactgtgactgatgagctgggccttcctgggctgctttatttccctgcagccccataaaagcagcttcattaagaaaaccacacactgctgagctgccagaggcatccagaagctggagccgcagccgctgaatgaggcctgtgggctgggctgcctccacttcctgggcccctcagcccacccttctgccctgtgcccacctcgcctttaaagccctccctaggccctgctcagaaccctccccactccaccctgcagaccccctccccctcctctgcttcttcctccctcttatgccaaggccgggtcctccctgggacttagccagtcctgaagggagatgtcacaaaggctgttttcctgaaacaggccctgcccacactgggcagtgacctgcgggctggcccagtgtgcccaagccctctgaatccccaggctgggagaaggaatctcagctttggaaatggcaaacatgcagggtgggctctcagaagcctccttcccagggcctgctcagccaccaacggagtgtccgaatcacgcagctgctctgaggccaagttccttgtttatagagcacagaagccactacctgcctctcgggccatcggaaagactaaatgaatgaatgcacatagagcattcagacccttgcatgagaaaaagttccccagaaatggcagctattattactattattatttattattggcctattgagcagtctgaatttggtagggtataaaaatggagctaaaaaataaaagtcacttgtcttccacccgatctgtcaaaatcctccctgacacggtctctccacagcgtcttgagcagacctcagcgctgtctggtcctgtccagaagggcttcctactccagtctggcatcctattcacccctggccatcccccttccctcatgcttgtggctcaggacatggagtgggacagggacccctgctgaggccctccacatcctcccctggtgggcagcccatggaaaaagtgtcattagatcactcgaccccacttggccaatggagcgcaactcgaagacttgccacagccaacaggctgggctccttgccctgcagtgctccatgggcctcctgccagtccacgccctacagatgccactggggatttgcatgccgtgctgcccttcttgccggtacctaatcgccatgagctgtttccccaagaagcaccacaaaaacactacgcccaggacagaattcttcccacttttcccttgcccagtcttctgtcccatcccaggaaggtgggctgggtgatggttggaggtaacagggcctttgaggaagccctgggaagatgtccggctctgcccattggcagctttttacagaatggggcactaggccactttagcctcttttttgagcccttgttgccatttctagggcaccaggaaaaatcccaatcaaattcctactcatcactaacattaagttagggaggaagcaacacagaagtggtaagggtgaatccagaaacagtgagctggggacaggctgtgggcctgaccccaggaacactaatcagctcaaacctgtccctgatgttaccattggcagaggagtggtctgaactcaacataggagtctggggcagagctcgcaccagtcagggtgatcctgatgggagagacctggaagctcacagctccattcagcacccgccaaaaactaggctcacacccacgatccttgctgtctccctggggcccgaccaccaccctggttgcaccgccttctcccaagccccctcaggaactaggaggccatggaagcagcactgtgtagggagtcaaaagtcctggtaggtccagactcttcacctaccacatgaccttgggcaggtcctccaacatctctgagcaccatctttgaaagaggagtgggcaccaatgccggctctgcaaggtggtcgttggaactaaatgagattccaggtgtcaatgctttgtccctggggagcactgggcccaagtgaggggccattctggctgttggagacccccaacagagattcccttcccacgccccaaggctcctacctgttattgccaccaaagccacagttgttcctctctccccagacgtttcggtggccagtggccagcagcattgacagaaatgagatgctggagattcaggttttcaactacagcaaagtcttcagcaacaagtaagtgtgggctaggcctggaggggctgggaggctgcccttctccttgggctaccgtatgtttggggctgaaaagagggacctacactcccaacctgccctggattgatcttcaaagaccgaagaagtcttgggctggtctttgatccccattttgctccctcatcttgtcgtcagaatcccccagtcctcccagctgctgtcagccaagaacattccaccctcctatcaccccttctgtctccaaccccatcaaagcttcctgtccctttctttaagtctccctcaatgctatgctggggtacagttacccactggagaggtgaaaggtggaggggctgaagatctcctccaagaaacactctgtagccctgaggacaggcttgacagtttggggtggtggtttaggagtcaggcaagcctgatctcagacactcaggtcagtcatctactgtgtgaccctggaaaagttacataacctctctgatttcaatgtgctcatgtgtgaaaaagacaagtatttacctcaaagggcagctgtgagaattaaatgagatagatgttcactcactcattcaacaaatgtttactaagcgctgattgtgtatcaggtactgaactaggtgctgcagagggcgggttgcctaccctcatggagcttgcactctgcaagtgaagtacacctgccgtacgatcattatcactatgaggtgttcaataaaagtagttgttgtccttctctctgggtcacaagaagaattcagaaggatttgaacaggctggaacagtggctaagtactatcttggattcaaaaatgacagccaggtgtggcacacacctgtagtcctaggtacttgggcagataaggtaggaggatcatttgaacccaggaatttgaggctagcctgggcaacatagtgagatcccacctcttttaaaaaagtcggtcgctcttatacaagctggaggtcatggcttaactataacatgtccaaaagatgtggaggtgttagctcactgaggactcagaataactcaacagtgggaggagactacaaagaaaagaagagtaggcttcattctaaattatactaatagaattaaagcacttttgatctaagcaggagagacaaggagtccactgctctgatactggtggcagagaattcctgcaggcaccaccctatagttgccaggaggaaagggactttaagtgttaacttatgacaaatagatgagagcatgaaagggaaaatcatagaggtcatattcatccattcatcaatccattgattcattcatccatccatccatctatccttcctgttattcatccatctgtctatccatttgtctatccatcagttgattcatccatccatcctttctttcatccatccttccatcctttcattcatccattcatcaatccatctctccatccatttatcaattcatttatgcacccgtttatccatatatcaattcatccatccatcctttcatccatcctatccatccattcatccatccatccatccatccatccattcacccatccttcctcccatccattctttcatcaatccatcattccatctttccatccattcatccaccactcatcctttcatcctttcattcatccttccatccactcatccatccattcattcatccttccatctttttttctttttttgagacggagtcttgctctgtggcccacagtggagtgcagtggcctgatctcagctcactgcaacctctgcctccctggttcaagctattatcctgcctcagcctcctgaatagctgggattataggtgcccgccaccatgccagctaatttttgtatttttagtggaaatagggtttcaccacgttggccaggttggtatcgaactcctgacctcaagtgatccacccacctcagcctcccaaatgctgggattacaggcatgagccaccactcctggcccatccttccatctttccagtcaccaatccatctgtctatccattctttcattctttcatccatcctgccatccatcatccttccttccatccattcatccatcctttcattcttccatccattcatccatctatccatccatcttttcatccaaccttgcagtcactcatcaaacatatagtgaacaaatgctttctgccagtcagacactatgctagtcactggagatactgagatgagggatttaggcacagtccctgccactaccctcccagaaagttttttgccacaggaagaggaaagaaaggtgtgtacctagaggcaggatgagggacaggctgctggaagacagcagaccactgaaagatagccagcactctccagccaatgtgctgtcttaggaggcagtgagctccttgccactgggagagggtgagcaaagagtgggccacgttgtagaggggatttctgagtcaggaaagacccgaccacatgggctccaaggagtctctgattctgtggcttttattaggagctttcaaaatctcagctgagtatggagcaagggcatttcaggcctgctagcagggccacagggaggatgtttagggcacaaaggtcttccctttgcctctcatggcatcacaccattcaggcagctgcctttggcacccacaagcaaggttggtgagacactccccactagggggccccaaggtgaagcacagccttcttccctggggtgagatactatgagggtttgtgacctatgaggacaggagaaacaggaacaggtggaaggctcacacacaggccaagtgggtgtgaaagaggaaacagaatcggaagtcaagcaccagggagggcacctgagagcccctgcaggaacccaactgtaggtgccaaagcatccaggagccttacagcttggccagtacaaccctcgctgtgcaggaggggaaaccgagtctcagaggggctcctgagatcacaggggtagacaatggtagagccagggctagaatgtatgtctgttacctcctcttcctaatccaactcccagaaaccaaaatatctgagcagtgatggtggaaaccgagggcatggaagacattgttaaataatttacaatgaaagctgccagcctaaccactgaaatgctggaaacccttgagcccatcaaaagactgctacgaacaaatcagatgtatttgggagattgggaaattgactaccatgcagtgaatatgttgaaagttccagcttctattaggtattttcgtttttgttttgttcggagatggagtctcactctatcccccaagctggagtgcagtggcgtgatctcggctcattgcaatctctgcctccctggttcaagcgattctcctgtctcagcctcccgagtagctgggactacaggtgcacgccaccatgcctggctaatttttgtatttttagtagagacagggtttttgccatgttggccaggctggtctcaaacttggtttcaggtgatccacttgcctcggcctcccaaagtgctggtattacaggtgccagccaccaaacccagcctgtattaggtgttcttaagtgccaataagaaggaagacagaaagggagatagttcctatcctagctctcctcttcttcttccctccctgcccccatccaagagaaggcaggaaaccccacaaggggaggcccagacccggtgaaagaggttctgccatttctgtggaagcctagagaatgcctagggcactgttggctgcggagcggtgatgggaaagaagaggtcccctcgtggaaagcacaggcccaggctgacacaggtcagcttgtgggggtcagagtgggagaaaggtgtttggaatgatatgacattcaagtctccccatcctggcatttgccttggccaggccaggggagcaataaggccactgccctcaacccccacatggcccagctcagaccccaggctccttctcatggggcggctgagtggagggggtctttgggtctgcactgggcttagcaatgagcaaagccatggccactgctagggacagtgcctggcacatagcaggtccctgattattttgtgaaataaaagaatgaataaatgcccccgtggtgttaggggtataccctctgtataccccagggagtgggagagcctttgagagggaatcagagtggcccttcttttctgaaggactgagggcactcaagggtgacactcagcatcacatgactgatggacttggggaaactgagttaaaggaggcatggaggagctgcctgggagagtggggcccagcatgagaaatgagcctgatcccatcactgccatctcagacagagggatttgtcctagaagccgagagcagcttggaaactggcccctcacccagtggttctagaggctgccaggaggcagacatggtatgaagaaaccaggagacctccaggtctgctcggccccatctgaaacaaagacctgtgtccaggaatcttgggcttccccataggaaagaaatgttgggttcagaagattttgtgcatccagctctgcctgtctgggacctctgaggggccatggcctggcctccagcctcctgcctgctgagaatgccaggggccctgaataattcaggagccaggagagcaggagaggccttgaagggcccaggacacctgacacgggctcccaggggaaagtgatgaattattgacaggattctggtgcccagttgccactctattgtggtcagtctgtgggcccacctgggctggaggcctcttcctgccagctaattatgtggggatcctagctctgcccagctgcccagcccctcgtgcccctgtgaggggcaccctctttgccatggtgacccggatggccatgtaaggcaagtagtcagaggacatggagttagccccagctcctttgcctaacagccccagggaaactgaggcccagagaggcctcttgtccagggtcacgcagcagattcaggacagtcaggtcttcaccccaggccttctgacgcccgggccagtgctccttcccacagaacacatggactcacaactccattcccagggaagtgacttggctgtctaaggggcatatgaacccacccttcctcagttgtcctgggccccactctcccaggcagctcctccatgctgacccatgcagaggatcaagaccctactatgtgtgcagccaggatgcacaaaggccagctgcggcaagcagggtcgcctctggggtcaccacaagggctagagccaggggcttccctacctcttcctgtcccagcttcttcccagagaatatcttcagagaacgggctgagggatggcatcctagaagcagtgccagggcctttgttttgaaactattttcatggcaagcactgtgtttttgcttaaatggtatgttacagacctgtagaaagagccaaggtttataaaactgcttttctttatactttacataaggctgagataatatcaattgtccatgtcaaataatataatttttacttttatttgagagaggttggggatgaactgttaggagttaaaaccccccaagccacttctgggagtgtggcaaattgattcctttaatcttgcaagctcctagcgtcccagtcccactctccgggacatagacaagctcttgccgtgcaagactgagcagagcttgaagggtgggggacagcctggttctccccctgaagcccatcctgcaaaggagacccccctgggtgggccctccagatggccagccctgcgcattattagggaggcaggaggggctggcattcgagtgccggtggtgttagaggaatttcacatcatcagtctcctcaccactgtccggtggaagtcggagggctaggacaaggagcccaaaccacaccgctgccagggggtgggtcctgctgagtgagcccacatctgtctgactccagagcccaggctcttcactgtctacactgcttccctttagggatggaattagtcgcatgtggacagggctcggaccagggagtgaagagtgggggatttgcctggaggccagtctcgctcagcacactatgtgattaaagcagtggctgaatggactaccagtgacagccccatcactgtcaccaccacgggagtatctatcagaggcttgaaagcacgtatcagggaggctgtttcagggattcctcctggaagggatgctgggcaaaatctctcaggttcttcccaagtctaaggtctgagactccggcgggttaagcctagaaggcacaagacgcctctctgagcacttgcagggggaatagctccaccctgccccctgggggtgtcttgtcacattgcagcacctccatggatcctggggagctgcctctgctgttcttaggtatctaattctggagaaagatgtgcctgattgccccacgctcaacaggtgcttgataggtcctaggggaatcaaggcatctgaatagccatccacaaagggtaacagtagagcagggattctcaaagtgtctccccagccagcagcttcagcatcacctggaaacttgtcagaaattcacattctcagcccccctcccacccactgaatcagagccctgggggcagggccagtggtgtgaactgaagtccagtggacccagtttggtgacttcgcatttggagcttaaagttggccatggcgggagtatttatacctcggaaaccagcaaaagctacagatcagcacctctcctctcccaccagtgacacattttccagcacatccacagaggaggatatcccagccatgtgtgttttcacaagccctccaggtgattctgttcatgctgaagtttgagaaccactgatttagaacaaaaagaggtgaggctgagaaaagatgagcgtattcttttgtgcccatggtctactgttagaatgtctacatggtacggaagctaaaagtcctcttccctcttcattttataaagaccaaattgagactcaggggcagtggctccagggctcctggccgccagcccagcacttctgtctctggggcactgcctgagctggggagaggtgcatgcagctatggaaggcttccatggggctgctctaagagcccagaagcccagtttggctttagagtgaaggaggggtgtggtcagtttcacccttggggaggtggggcgcgctggtagatggggctctgagctccagaggggagcatttcatatccatccctcagggctgcccctaccgcttcctcccctcacagagacgggaggattttttaaaaatcagtgttcaccctccatagacctcaaggtggtatagacatcaagcacgcctaagtcagaattcatctgattcctcacctcacccagatctggctttaattagctgtgtcctttccccttccgtagcctcaccgtcttcctctataaatctcaagcagcatcagatgatgcccaaggtcccttctagctctcacacaccctggatgcttccctcgcctttgtgccttcagctagatacggtgtgtgtgttctcaaccaccccatgtggaagcacgatgtgaagacgtctctctgagttccccgttctctccaagagcagcaaatgccttctgactgtggagtgcaatggggttgaagtcaactccatcagcatttattgggcacccactgttgttcattatttcagccagcagatattgagatctctagtgtgctagaaatgtcaaacggaggctggaatagaaagcactacccttgccctggagaggctcgcagtttagaggcagcacatgaataacgaccaaccagactgcttcggagtgctggctgtgctgggggctctgataagaacactcgcagatgatctcactcagtcttccaacaacaactctgtgaagtagggcttatcagctcatcttatgagaaaattgagactgagagagtttaaggaagttgcccaggaagcaggtagctcgttagtcaatgtcagagctggattcagacccctgtctctttgacgccaggactgtgctgttaaccaaagcattgtaccgcctctcccctgctgtgcagatccatgggctctgccatcacacaggttcctgccatccaggaacctacagactgcggatgtggaatggatgagtgagtgctgttggtgtgggctggaaacctcggtcatcattagggaagtagaagccggaggagctacttgtccatccaggaacctcaggtccttccccagcctccacactgagcatctggaaacttctctgcaagggctcagctaaacctgggttccatgcactcttccccacattctgtagacatcccctaagggtgctcactgccccttggagctctgccaaagaaatgggcctcccacaaacaaccatccacagtgagacatgctgccctggctgcaaccagccctggctcctaggccacctccagcccagcccagagctgcagcaagccacctcagtcctccctaagcagtcacagctcttgggatatcagtcttgctcctcaccctggtctgttgcatgtaaccaccatgtgccctctgccgtccctaggctcatcgggaccttccgtatggtgctgcagaaggtggtagaggagagccatgtggaggtgactgacacgctgattgatgacaacaatgctatcatcaaggtgggtgtgccccaggaagttcctggacgttcccatatggggccatctgggggtctgttctccctgccccacacatggggtggtctggggaatgcccctcgtgcatggcgaggtgtggtgggaggaggagactcaggtcagactctgctggaacggctcaatctgtggtcatggctggaggccctgtggcatggcagggtctgctgccccacaggaagcacccctgtccttcctacggtgagaatgtacccttccatttggacccagctcaggagtcattaaaggggctcctctcgtcatccaaagaccagactgagccccgctggcactcgagggcatgaccttcactctgtgtatctggctccagtcctccttaggagggcagggacctcatttcctattgtttgtcacatcccagcacttttgcatgagcatgcatgcactagtgacgcacagtccagaggcacctgatacatgttctaacaaagaaggaggcaaccctaccaagacagcctggccccaggctctgctcagattcttcagtcctcttgaactcagccatggccgctcgtgggcagttggcatgatggtgaggaacagggaccctgggtatgaatcttaggtcgctcactaactgtgatttgggcaagctacatatcacctcaaagtgagcacaattatggtatccacctcacaggactattctgaagattaaaggagaatacacagaaagtacttagaacagatatgcacaataaatctataacattgttagctattatttcctgacctcagtttacccatgtataaaatggggctgtgccattgtcccgcaatggggtcctgtgtaatatatgaccctatgtactggccaggagaaacagcctcagaagccaggactgcagccacagggtgctagaaaagaaggaaccgtcttctcccatgagcaggggtgggcagagagggcttcttaaagttaccggggtctcagccaccacagcaaggggagaaggggtgcagaacaaactgcgtatggacacccatgggaaggcgggctgggaggagagcacagaagcctggatgaagagtgtagtgtgggaagtgagatgagagaattagggagtgagcagggatggacagacagcacagcccacaccctggattttcagaatcagacttaagatgtcagcggaggaaagtactcacagatctcctggcccacttgccacccatctctgctacccattgttatgaatgggaacaatgaagtcctggatggggaatggatttggccacggtcagaacgctagtcgacagcagggccagcatggacacccaggacttccaatgccagagaccaccattttcccacaacaacatccttggttccaccaagagggtcacatttgttccacggaaaggacatggggcttagagtcagtcagcctgagctcagatcttcgtagctgtgtgacttaaagcaagtaacttaacgtcctgatatgcgaggtaaggtaggttgcaatgttgaaaagatcaaatgagtggacattaaaattaaagtatcttagcatgatgtctagcacagtgagggttcagaaaatatgtgcacctttcccttccttgggaaatctaagcctgggtgctggagtgtccaagcactgagtgagggccgcctgtctggggcacaggcataagttacctccagaccagtgaggaagggtgatccctgggcactggggggaaactagagctgcgagaaagtaatggccccaggacacagagcaggaagcccagtcatgattctccattgctaagcctgagcctgggttgagtgctctacttttcccagaggaaaaccctagggcagctcccaagattccttccctctccagggtagaaagggtgggtgtgagcctggggcctgggctcctctcctggaggccactttcagctcattctgtcacatttccaacaagccgatttctggcaggtcgcgcttcatgcctgcaggcagcccttgttctgaggagaggaggtgacctgatcatggggatgctaaacgacactctcggttatgtagacagtggactcaggggatgagtccaggctcagttgtcccgggcaggccaggcgcctccacctggagcaccagggaggagtggagccaccagcagcgggacctggagtcagatcccaataagctgactgggtctgcgcaagtcagcctttcagagcctctgttttctcatcagcaaaatagggtagaggggatcataccatcctaacctcctccagtgaggcaagggtgtggaagcgctgtgtaaacaccaccaagcagccatatatacggggtggagatagctgtctccatcccagctgctcaccaccacctccctcccttcagaccagcctgtgcgtggaggtccggtatcaggccaccgatggcacggtgggctcctgggatgatggggacttcctgggagatgagtctcttcaagaggaagagaaggacagccaagagacggatggactgctcccaggctcccggcccagctcccggccccccggagaaaagagcttccggaggtaacaggaagggcccctctggctgcccactgctcccaagacacggggaagaggcctggggcctagtccccttgacaggcctctctaggcctagctgggctcagggtacagggctgagcttctggagagacatccaagaggtgggaagatgtttctatagtcccccacccagtcgtccacccccgagttcactgggcagggagcagggaactcagatcaaactgcaaggccaaggcctccccagaggccctgagggaggtggagctctaacacagggatggggctagatctcctgcctttctcagagaaggggagatgaggataggaggggccctggcctctctggttcaagacccagcagtgtccaccaggtgccaggagcctgacctccaccctggcccagtgaggaggcccaagagagggcgactcttcctgccagagtgaagccaaagatcctggctggaccctggcctttcttcctcttgagaagggagggctcctgggaagaccagagtccaggatcatgccctgcctggctctgtgttgctacaccaccccaggaggttgccttcgtggctgctaagggctcccaggacattgtttcccatggatctgaccaacaggttcggagcgtccctgggtccttcaggacgtcctgccacccacagaccacaggaagctgggtccaggccagttcattccatgtgcactatttttacaaaacagaaaacgcaattgtattactattagagaccaagggttcctaagtcactagaatgacatgggttcctaagtcactagaaatgacatgttaaataccagtaagtcaagggtgcatctaaaggaccagggtgtgttttgagaagggagcctccatgccactggaaacatatccctgtaagctccttccacgctttcctttccaagtaaagtttactcagtccctctgctgaagaaaacataggttctaaattagtgtaattgaactgacggacttttaaggcacaaatatgttttctcctttgcacttgaatgagttcacactcccttaagcaccccctcacacacacatgcctgagtgcacatatgtgcgcatacacatacacacacagacacacacaagcttcagaaaccctgggaaccaggtgagtaatagtaacaaggtcaaagtgaccaggcctgcaacaaatatggcaggactgtctactccaggccagccgcgggcatggggcagccccgggctagcttggagcctgttcccttagactcctggctttttagcagaagagccaggcctgagtctgcctcttactagtcatgtgacccttggccagtctctgaccctctctcctcacctgcaaaatgggacatagcaatgaaacccccctgccctgctgctgggagagcgggagggatcacggaggaacgggtggcaatggaggtgctgagcactgcctgtgtccgggctggtgacaggcaaacaggtttcttatagcacaacaacgcaaagagtcaggaatcgggttggaaattgtgagaagaggagcagtgcctggatggggagtgaagggatgctgacccagtgggcaccaccaggtcctccttgtctgtctccattcaggaaagaggttggcagggctggtccacaaactgtggctgggctctaagaaagggcttccagagaacaagatcggaagacacatgagggccatcagtcgctgggaaaggaatgctggccccaaatcaggagagctaaggcccattaagtcccatcttgactgttcggctcactggctgagtgacactgggcatgtcactagcccctgtgggtcagtaacacgaatgggttcagcaggttaaatctggctcccctccaactctgacatcctgagggacccagggatgccccagacctgtgggtcacatccatgggaaacaatgggagcccttagcagccacgagggcaacctccctggggtgacatagcaacacagtgccagtttgtcgctcggtcccacaagggtgggccagggtgctgatgggggctttggagagcttagacgcccagagagccctgggcgccaggaatctggagataagagggctcccccgacccttcctcacaggtagcttccccacctctccccatcttcgtgtggcccctcccagggtagcggcaagaagcaggagcaaaaggaagggcttcacccccaggactgggaattgggagagggtgacagccgaagccaggcacccccaccctgcattgcaggggccgtgtgcaagtgcacagtttccctgctgccactggagctgccagcccaggtctgagagcaccttggggacagacattactgctacagtgtacttctcctgccaggcctagccatgcagccagcgggcctggttgtggaaaagaggggttgagaaaaattctagagataggccatttgctcgtgaggagaaggtggagcaggttcaatgccttggggttttcctgtagcttaatcctggctacccatatggggccagtgagttctgggtcaaggagtgctgaggtgaggagggggacctggaagctggccccacagccctagatgttgcatctcatccttgtcacatagtgtgggttctgggaggaagccagagagctctccagaagggacttggccaaccttttatcaggaaaacaactactccctaaagaagacagcacaagggaagaggtgtctgtgcctcacctcagacctcaccaggagcccaggcaggcttccccagcatctgctccctgccctccgtcctcttctggaaaggccaatcctcttatagatcagagtattcaatattcacagtaccctcttgttcctgcttcagtcacaatgagcaagaggaaaatcccgttgctggcaagcagcagtgtctcaccggccatcttgacccccagggtctggcgtggggatcggctgctccctggctgatggggtgaaatgaagtcttgctgggggctgcggggaggtagagtgagtgggcaggaaacagcctcagcccaggcaggtcccgggcagcccgggctggaacttccatggatggaggggaggccgatgccgggagatcctctgggcaccccatacctctcctttcagggcctgggcccacccccgaggcctgccctgcctggcctgcttctctgggacttcaaccacgttcatcctgtcttcattctgggggtcagatggttctaagcaggggtactgcggacctcaggcctcagctgctgtgacactcactcctaagaccctaagaacctgccatgaagttaccccattcgtcctcagggaatcagtatgggagctttgcgtgagtgaccaccaaccccaccacccactgaccctctgccccaacagttccacctcccctaggccctggtcagccacatgccctctgagccactctgcccacttctctagttcctgccaccaagccaggggcccctgatttctgccagctgtttgcacaatgcccccaggaatgtgccaggaagctgtgctgtgtgacagagcacaggctccactcacagctctgctattgggaatccccctccccatttgtaagacggggcttacggttgcctcacaagagtgtcaggattgagtgacgtgcacctgcgagccacccacccctgtgcctggcaggcggcaggtgctaagccagtgttcacttccttcttcttcactgactccgtgttaccctgatgtcaacttctaccctgagcagcacctgaccctctggcttaggcactgtccaagcacgttctcagctctagctccccaacctataccaagggctctgcagaagctacccacacaggagccctactggcccaggggcaggcgtagggagctcactcactcagtattcccctcacctccccaggctccctgagttgcagagatggaatgaatctctaacctcaggggcactccactctcagcagcacaaaatcagtgttccagacctttgcatggcagcatatgcctgccctcgtctctggagagaaagtgacttcggccctgaccacactcacatgcacacacgtgtgtacaaaagtgcccatatgtttgcacacactcacatgcactgcatgacaccagagaggactccggatgctgggctctgctgctgctgctgtctttaggagtcacatcttagagaggacaaagaaagaaatcccagctttagtcttgcagctaaacggttgagacctgagcctttcctcctgagtccctgtattctgtgactctctcctcttctcattttctccacctggcctggctctcctgccctccatgacccccacctccttctgctacccagaccctcttccgctggtctcctctctgctggctctcatctgggaggagtttggggcagcagacactttctcattctcgttattgatcattcttccactccagtggagacctgcagaagtcagataccttcctcctatgctggggccagagggcagtggggcacgtgtgcatggtggggctctgagacagaggggcacggggtaggcatgcagaagcgtgttcatgtggggtcagtacacgcagcctcacccaaagagtgttttttaatcagttcccacgacctctagagagctagaaaatcctctgctgcctcccttctccaggctgagcaccagagttgcagaagctcccaaagccactcaaaggagccggggcagccgggcagccgggcagctgggatgctcttgcttgagacacagtcctcctcctctgctgtgagctcttctccgcttagtaatctcagctgatctgggcagccagaggcctggctgatgttaacgcctttgaattatagactgacttgcttgcctaacataaaggttagctggccagtaccagactgcagctgtgctgtgtctaggccttcaggtcttgagccatcggggtatggagtcaagtctacctgggtaaggcctgtgccagaacagggtgtgaggagaagaataatttgctaattgttattcattttcttgtcttcatcctcattgccacagcactgggaaagcattgagagaacattccagaaaagttttctggaagcctccctaaagtgagataggagcaccgttttcccctgctctgaaccctggagtggtagctctcttactgccccacctacacccctagaaggccccccatccaccagggtgcactccgtagcaggacccccagccctgcctcaccctcacagagcaggcttagcccactgttcccctagaggcccccagagcctgggaggtcccaccccattagaggggagcaggggagccagtgggcagaggagcagggtggcccaggcccagagggtagccaggctcatctaacgctgcgttccctgaggaacctgtgacccacattgtgaaatcatcagagcctggtgggggagatgagctgaggccctgaggtatcagagcttggggttggaatagtggccacccaggtccagcattgtgggcccctcccctctccccgcaggacagaacccagggccatgggacccctaccctgcagacctaggcttgctaccatgagaagctgtggggtgagaggtctgtgggacaaggaggcccctggggagcatgcaggtccatggggccggggctgaggccagtgtctctggtccacagcccctcacacacatccccttgtctcctcatttctttcccctactcagcaaaggcagagagaagaccaagggaggcagagatggcgagcacaagtaggtgtcccaggccagggcagatggggcagtgtctctgcgggagcagagacctcctccccacaggctgcagagggcgggacgggcttggctgagagggctcaggagtgggctgtcatggtggagctggaacggggtatgcaggcccagggaggccttttcacctggccatgggggtgagggatgaggaggggttagggtgggggcgggaggtgtccaggccttctggtctccactctgggctctcaggggtgaccgtcctcctgtccgagtcttgttcctcctccactgttcagcccccatcctatggcctttgggcttccctgggagggaggggacagttacaggcaaaggcgagaggggtacaaggacctcagggacctctctgccaacaggggcgaggcagagccaggcagctggaggcataaggaggaggagctctgggtatgctttgcagcagcaggtcttgggtagagctggagacctccagaaagctaaggagaggccaccatttgggtggccctctctatcttcatctccccaaaaggcttcctggaaaaatgaggtcagggtactgtctggagaggataggcgaagggtcctgcaggtgggaagggccagtcacaagggtctggaaagattcaaaggctagggcttgtgagtgggtctcgtaggcacccctagaagcacactgacatctggatgactctagcaacacgggatctcacaagggcagggggagccaaggcagaccacactggaggaggcctctggtcaacacctgctcttacagataacaaatctgagtctcagaacaggggcagagctggaaccagaacacagagaaactgacttctgacctggagctcaccatagacctaggaagtttagagcacttgactgtactctaaatttaatctaattctccaaacacaccaatgagagctgaaaagccaggagtgtggtcgtttttatcttccagatgaagaacctgagccccagagatcttaagatatttgctcaaaactgtggcctcagtacattaagaattagttcatctgaagatatcatggaaatatcaggattgtgtgttgaggggtctgaactgatcaatactggtgtggacttggagtatctgttggcattaagatcctggggaactcacagcctcattcattgcttccaaaaaagtatgagttctaactcacatttgttatgcacaagcaaaagcaatgatgatgcagtgttaactctgcagtgatggaggaaatggcaccgtgtaggaagagctccggcccagagacctgaaggatcgaggagtctgccaggttcccagtaagggaagaagcctgggcagagcatgtgttaaggctcagagccagggaactgaatccagggcaggtggagatgatggggaatgctgaactggggagtcctcttagggagtcctcaaggctttgggtttctccatagatgcttagatgtaaagggcatatgaatgagatacgagcagcctgtccatccccaggttccctgcctgagaacagagatgctgtaaggcccttcttgatgcccagctccccagtctgtcccaggccagaccctagggacacagactgacctgatccctttgactggctacagttggagtaagaggtgcctcacagtgccagcacatagtagttccacaaaaatgctggttccctagcccttctccatcctaatttcttaccatctctaattaacacatgagataaagtaaactggcatatagtattattattattattatgtgtagagcaataggactattgaaataataggaaaatgagatttctaagaagagattgaacgaatttaaactctttagcctggaggagagaaaactgtgggaacagatttcaatctctgaaatgttaatgtgtggcaaagctggttggtatctatctccactgagaagagataaatggaaatagatttaagttgaagtagagaaacaagattcaacccacaaagtaactcatattgtgtgacattctgggatagactggtttggggagatgggaaatcacccatcatcttctatgatgctgcttgcctgagccttgcaaagggctgggccaccagtaagaaatgaagagacagcttccctgacaatcccggggtcaggacaagagtgtgtgggcaccccaagccttctggtacttcattctgaccacggtgaatgcagccataggaaactcaaacgaattctaaatcctcagagggtcctgggatactggcctccccttggctctcgcttctcaagctttaatgcgcccaagaataaggagccatttggttgtaaagtgagtcatgtgtgcaaaggggccagtttggagacagggtggttcttgtgtaaaggatcagcctatcctgcccacctatgggaagttcttcaaaaacgaactgaaattcaacccactttcaaagacacctgtgaagactgaaattatgaaattccctgtgtcttggggtatggaaaattttttaaaataaacccatttaggagtgcttggatgacatgctctcaggttttgaaaactgggctatttgagcaatgcaaagacggaccacagaccctatttctcatagataggagtctttatcctgattgattacctgaggcctgagctaatgagcctagaagttccagttgaagccagtcatggggcagaagccctgggcagtgaatggactcaacctgcagcttatttagggtcaggtctctattaactttcagaataacccagagacttgaattaatgaaacactcgggtcactaaatttagtttggtgaatgttcccaagtcattataaatactaagctcttcctagaaccctgtgtgcaccacatagccaagcaatatacttctaaatctgggccataaaatgagtggagaaataatcagatttacagtttacaataagtgaactaattttagcatttttcctctagagagagataccagtctagattgtaggtgcacttcattctgaccacggtgaatgcagccacaggaaactcaaatgaattctaaatcctcagagggtcctgggatactggcctccccttggctctcgcttcttaagctttaatgtgcccaagaataaggagccatttggttgtaaagtgagttttcgctgagttgattattggctcgttttctttgtctgtttctcaccatatcctatttttggtaattgtagaactcaactagaccaaatgcagaattttattttgaaagccataaaaggccaggacaacagacacctcatcagcaaattagattttttgaaatctaagtctctcagacaaatagataatcttcaaaattccctgattaagttggcatttatttcaaaactctcctttacagtttgccaagagaagcaggcatactgctttccaagaactggtgctacaatcaggcagaaaagaccttttccatagtgaacttctgatgtgttactgatcagaaaattacaaagggtggtggcagggatgacatcatgctgtactgatcacaattcagattcactgaagagcgagtctaggacaatcagaggtacagagcctgtagtaagaattctggaaattacatccttcactacacatttctgcatttttaacaaagggacaaagacaatatccttttgagatattcccaggcacacaggagtgctaccagtactaccacttcagagggctaaaattttgcagggttggaagggagagatttctcctttgaattgcttcaaggtgtagtagaaatagttggacaagtatagttttggtttgtgtgtttgtttgagacagagtctcattttgttgcccaggctggagtgcagtggtgtgatctcggctcactgcaacctccgcctcctgggttcaagcgattcttctgcctcagcctcccaagtaactgggattacaggcatgcaccaccacgttcagctaattttagtagagacggggtttcaccaagttgaccaggctagtctcaaactcctgacctcaagtgatccacctgcctcggcctcccaaagtgcagggattataggcatgagccaccgcaccgcaccggctttaaaatgatttaaagcctcgatcatttctttcaaatctgtttgtgttaaggaataaagtgaccttcaaattcaagggccataagtgccccagggatgcctcaggtccttttccacctgggtgagtccatgggaccagcctctgaaagccatttcctgctaccttgcactcccccttggcctcaggcagcagggccagatcccatcccagcaggctgggcagctggcttctccaggcagggcctgcttctgacctgccatcccaaagcacttcccctctggggaagcggggaaggggaaggggagagggaagtctgtggctggagcaggctaaaatggcaaagggtaactatgtaggtcacacatggggaagggccggggactccaagaataatacagcccaggaatggccaagaagtaatggtacaaagtcaaaggctgagccctgcaggagactcctgggtaattcaggagagacacagttgagcagcaagcctgggcagaaagccctgagacaggaagtgacccacgaggaggcccacagaaaccacacttctgaggctggggctatggcaggggtcaggacagccagcactcctgcccttggggccaccaggtggggagaaatcccacaggatgcttcagggcaagccagccagggtggtcctttccccaccatcacacgattatttctggtgggttcattgttctgttcaatgttatgtcaccagcaatttaacatgcacagccgccccttcccaaatgtgtgggtgttcaggttctttttgaatgagccccttctttgtaaacatgggtatgatccatgagatgccacagatgacagcatcctgatctgtaaactatgctggcacacagaccatacctgtatctacgggtgccagccctggggccttttaactaaaatcccaaatggtcaggatgggatgggattcatgcccatggaaaagtgcagtcctacggcatcgaggcaaaggacccaagatgcagtgaaaatatttctggcctagaacacaggagctttctgtttcaatcccagttctgccactcaccatgtgaccttgtgattattttcacctctctgagcctcagtctttttattggttgaatgaggagaagcatgtggccctcagaggattgcaggaagatgagatgagcagacatctgcagacattgcagacatctggaaaggcctttggccctctgtagtctgtttttggccattgtgtgtgtgtgtgtgtgtgtgtgtgtgtgtgtgtgtgtgtgtgtgtgtgtataactcacctccccccatcagaagggaggaagcttttaaaaataattccaaaggcatcagctttgattttagagcctctttctttccctttcttcccattgtcgtattgcagacggtatgctactgaagagtgcagacacatcagccttcttccattcctttttaggaattcaagaacatgctaatgttctctagattgtgagctgctgccacgtgaaaagggtgattctcaattgctccctcactgggatatgaacgtgctttgtcttgaatatgaacagtaaagaaagggcctggggttgggatagggccaggtttggggaataagattggctccaccatcctgaggagaggggcttgaggtttctaggtcatctgcctgaggacagaaaggttttccccaatctcccattgcccagcataaagaacaaggatctggggtcttagaaaccatagtcaagcctccacggggagatgtgtgacccaaaaagggtggactctgccgtaagtgagctccaggttggagcctgcacctggccccacctggcctacaggatgatggggccacacccaggaggagggagaatgggaagtggagggagtcaggtatccactcatgcaatatggatggggtaatggaacactgcactttaccccctgctgatcctgctcctggtgcttcctggcaccaggaaccacaggctctgctgcagggacatcactgaagggcagtgaggacccctgccccttttcctcagcccccccgactgcaaggcccttcgcctgggggcacaaagccacagcaagccagaggaagaggtaggaactatggagcctgccataagttcctggggttgggggaaaggggaattcggcagtgagaggggacaggtagaaggggcaaaagccaagactgaagatagatgggaaagggcctatctccccctttttcatggggaccaaggaacatcccagaacacggagaggttggagaaaggcaagtcaggctttgagcaccgaggccatctgagaactgaacagctcgtttcaaccacatctcccatctcctcatcggcctctgtccctgagtcctctctggtccctgtcccactgttcagatgctctgtctccggtcctcgggctttctctccaaccagctgagccagggaagatgagcgtggggacattggcagggctcggagctctgagactatactgaggggctggaatcagactgaaaagaccaagacccagaggagctccagttaaaacggctcttcctggctcaaggccacgttccctgcttgctggggaccccatccctctcctctgtgtgtgaaaggatggcaaagggggaagtggaggggtctctctctgccctcattccccctcatggctcccaatttgggaagacagatcccgacctatttcgggaccagcaggtgaggggccgggtccatctcctttctctgatatgttctctcatgtttggctcttctgtgtttgtgtgttttcctccacgcgtccctctccctgcacctcattctggcggccccctcacagagctgggaggagcgtgttctccgccatgaagctcggcaaaaaccggtcccacaaggaggagacccaaagaccaggtaggacaggcgccgcgtccccgcgtcagccccgcgcctcgcggcgccctcccgccgcttgccagcccctgcccagctgccaaaaggtccgcctgggattggtcatccagagccatctgggaggggcctggactctcattggctggcccagggccaggccccgcccagtgaggcgaggccctctaggaaggggacgccctggggccgagggagggaaacgggccgcgccctctgtcggctgggcctggttacaaagctcctcacgccctcgttgctcccggttctttcttcttcacacagaagcccggagttttaattagagcagagaatatccatcaagaaacgctgtttggccaactccctatttctggggggaaactggcgtcccactagtgcagggttggcggcaggcctcgccagcgccctctaatcaggctgcagcctggccttaggggaggtcctgggggcgctggagggcgcggcagggccgagcttgggaggctggagcagcaggtggcactgggccctctcagagcagcggctggagaggggaagacaggcagggaggcctggaggaagacaaggggagaaatggagaggacacgggagctgggagggggccatcttctccatcacgggcccaccatcggggctcccggctgccctcccccagcatcccctctgtggcccaatggccctcagtctctctccgccaccctcttgtccccatgccaataccagccgtgcccttcaccttcttaaatggagagagtacagctgctggctgaggaccaaacccagtatcctctggtggcttttcggaatctacatgtctgcatctcattagatgaataccagtgcattcggttctgaatgccatcagctatttgatatggataagttacttcctaagccttggtttccgtacctgtgacatgagaataatgcccatcttggcagggcacagctctaaggactagagatactcatgtaaagtcatggtgttgtgcctggaacagagtatccacccaataaatggtagctatttattgagaggtgcaaaagtatggattctttattccgtaccttcatccacaagggatattcagtgcctaagtaagtacaatgcaataaaagagcattcaattaaaataaaaaggcaagaccagacataatatccgttcaaatgcaagatcgggattaggtagaaaaacattgcagttattcaggccataacattctaagcagtagcaactaagtaaacctcgaatttaactctcagctttctggatgccagagtaaaaggagaaagagtcactatctcaccatcagtcagcccacctaaccagtctttcatcttccccagatgaaccagcagtgctggagatggaagaccttgaccatctggccattcggctaggggatggactggatcccgactcggtgtctctagcctcagtcacagctctcaccactaatgtctccaacaagcggtgagtggatgggagccccacaaccccaactgcccccaccctgtcaggcaggaccttgctatgattgaaatttgggtagggaagaatcagggcccatggacagcttcttcctaacctaatcttacccttttctgctttttcttgggtgtttctctcacctctgtccctgcaaaagcagagcacaacaggccttttctcaggtctttgaatacctcccagcccaaggaagccacagacctgcccaccccatatttgaagctattgaccccatgtctgtctccctgttacttctgcctttgattagttctctgtgtcaaggcctctgaaggcgactaatccccactattcttggcagtgcttgagtgtttaaagaccacgactctgtccctctgcccactcccaggtctaaccactgcccatgccctcctcccccacaagcagtccccatacaccaggcctgatgatacattctgttcctcagatctaagccagacattaagatggagccaagtgctgggcggcccatggattaccaggtaggtgggcacctggaggcctcatgtctttcagactctgctttagtgggggattctagctggatgtgcattatccaatatattgaggcatggatccaggggtcatagagaaccacaagctgaatatgtttccaaagtaagcttgttcctgggaggcattcctagaaataccatcagtagagagatacaaacccaaagaaaagcttgagaactctgcctatgctaatcaaagcccttccagtatttcatgttcagcattagacttcataaagtgagaagcacctagaaaaaccataaagagaccaaggagaattacaaagaaaaagtattcaaagtgttaaaataagggccttggaagaaagttttcctggaatgatttttaaattgttgttttgtattatttgattgctagaagtaatgtcgattctggttatctctggatggtgagaatgtgagtgattttttgttcttctttttgcttctctgtattttatgagattaacacaacttttttatttgtgtgcttctaagactggagacaaaagactgagacaaagagacaaagagaggttgacagctagctgtgagaatgtgaatgtggccaacagtgcaggcaggacaggtgatgagcatgtctggtggctgctgggacaccatctctcaggaaaggcccagggaccctccattgctccagacactcccttggaggctaacaagactcagctataaatcagaagactgctgggcattgctagcactgagtgagaatgctggctgctcagaggggacagggcttgcaagagatctcagctggctgccactgcacttctgtcctagatatgttctgtctgggtatcagcaccaggccccagaatctgagtgagccccatctaccggggtagagctttatctttgatacctagttcccagaccccatgcacaccaacccttctttacagagaaccccacctcccctcactcaggtgatgaaggaaaggataagacggcacttttctatgcaaaagatacatctggccgttttctccagaatatacctcatctcccttcatctttgttttagttagtttccacctactcagcacctgtcttcccaggtgcctgaaaaacagccacaggcaatgtcaagtgaacctgcccctatggttttaaacaactttaagccattgggttccttagaggtttgagaattctggccccctcacctctgccaaaacccaaaacacaaagtgtcctgagacttccaaaggcttttccaagggattacgttcagggttttgtttctctgtgtgccaagaacagaaaatttccaaagaacaaagaccccaactcagagatgatgccactggcctgagaggtaagggcacatcaaaaatacagtcattattgttcatgaaacttattttcgaaggtttatgctatgccaggcactgtgctaggagccataaatgtgtttccattgaagttaatgtaattcttcaaccacccaaatatacgtgttactgcattttataggtaagaaagtgaggccccaggaaggtcaggagcttgtcccaggtccttgccacatttagccaaggctagagccagggttcaaggccaggggtatctggccacagccatcagaacaattgacttctctatatcaagccttctagacagctgctcccttcgggtacctggttcatcttcatcttgctacttagtgcttgttttccaaatcttttcaaactgcttcccaccagagatttttattaactgaaccaaacattgtcccctccaaagactttttaaactgaactgaacaaaacagttgtatttaacctggtagcacagtgtttcctgacaagttcattcacagctcaccttgcaaacatttgagagagagctatgaggatgcaaatgtgaaattattttcacttccaatacatacaatgtataatgcagtaaaaccaggccgggcgcggtggttcatgcctgtaatcccagcacttttagaggccgagacgggtggattgcatgaggccaggagttcaagaccagcctggccaacatggtgaaaccccgtctctactaaaaatacaaaaattagccagtcatgatggcgcatacctgtaatctcagctacttgggaggctgaggcaggagaatcgcttgaacccgggaggtggaggttgcagtgagtccagcctaggtgacagagggagaccctgcctgtctcaaaagaaaattataaataaataataaaaagcaataaaaccagatgcaacttcagtctcttggagactttgggtttgatgagttataaagacctcaggaaggacatctcattggtgagaggaggggagacttagctgaactcagctccaggaagggttgtgagggttcaggaccattctaaaggttatggcactgaaagaagcctggagataaaaggaccatggcattcccatgctccctgtttcttccatttagaatgcatgtcacatgtaaactctttcctgattattgtcatctccaaggcaagaaaccacagtcatcccctgtgaatgtgcagtttccccaccagagtgagcaatgcttggcacttggcagacatgttcttggtgggtcaaggggtcttgagtctcttcattaccctctcttcctggcatcaagacttaagacattgtcacccaacatctctccagttttcacctccatttcatgcccctgctgctgacctgaggtccccagcctcaattgcgtgcttatacccactttctacctggtctctctgcccccatattgcctcctcccctccaacctctatgccagcactgaagcaatcttctgaaaatgcaaatctgatcatgtcacatctctgccacctggaaaagtggggagtgggtaacggatgttgcagaagggcagtactaaagggcacaccaactctcatctctagctcccggcggatgttcttgaagctggatcaggtccgtaggaagcaggccacaaagcatcgttactcttgggtttccccaggacaggggtatagatttaccactcagcattattccttgtgatcactttcatcaagccactggggagtatgtcccttatcttgaaaggagatggtggaatagtcagctggtcagttggtcccagctgtggcaccatttgcctcttcatcttccaccctgggaaaatagagtcctctgctgataactggagagaaggatggccaagcccctcccccagaaccctggagaatgaccagctgttttttattttttatttcaaaagcatcatttccccttcctagggccccaggcggggtgggaggcaataggaatggcattccccttcccccaacaccatgcacgtggtggtctttcttagcgccctcagcttcctctcggggctgcccctcaaccagcaatgagcaccctctggagcttctcttccttccattgctccttcaagtttctgcccacctccccctccaccctccgcctctactgccggagcttctgtccaggttgtcaccttcactgattctgctccatggaggaagggagatatgtgtgagtcctgaaatgggggacagggacaagtagcctgtcctatggccatgcctcgagatggaaaacataaaacttaaccattctcttggcagtgggaaggagacttgccactggcttatctttggcagatgccaaaactacgtctgtccgcttcccagtcttgagttatagaaagccttttttattgttggtgggggtatgagttgcggaaaaattcatggggttttttaaaatctttggcaaaaaagtgatcgtggaagttaaaactctataaactagtgtgcaaaggaggacttctagtgtctgtctgctctcttcacagtaaacttctcagagctaagttaactagtcctatttcctttttatctccctgaaggagtggtgaatattgaacttctgtgaagctccagattctaagcttttacttctgtccctttggcacttcacgttcgaaacagaaatgtttgcttcctagttcaagtgtcacttcatttgtaaatatcccatttcctggcaatgttctcattaatatcggaatttctatttccttaacctgattacttccgatgtgtagatttttcgttgccctcaggatatgtttcagactttgatggatactggatgatcattttagtggttattctttttcatgaaaggggaagataattctctcaagtaaagttgtgtttagaagttgcatcaaagcacaactaaaacatgaaatctccaagatgacaggcatgaagagcagccttcagagtctcattagaaaaatgtgctgggcgcggtggctcacgcctgtaatcccagcactttgggaggccgaggcaggtggatcacgaggatagattgagaccatcctggccaacacggtgaaaccccatctctactaaaactacaaaaatacaacgtgcggtggcaggcacctataatcccagttacgcgggaggctgagcctggagaatagcttgaacccgggaggtggaggttcagtgagcctagatcgtgccactgcactccagcctgggcaatggagtgagactgtctccaaaaaaataaaaagaagaagaatgtactgaggtccacacttattctagctggggaaagacttttctgttaaaacacacgtttgagagaggcaagtgaatcaaccattctaagtatcatgcacagcctcacctacttgagagatcacccgcttagctgaagggagattctactggagtcactcacattttatagagctttctgccgttgaggatgcattttgacacacatgatctcatttaacctgcacacaaccttacgggtagttggtatctctgctagtagctgaataacacaaggctatgtggtcatttgctctcacacctggcaacatctcaggtctggggttcaatgccaagttcagcaacccccagtacatgcctctatctatcctaccacggccaccctgacaggaactgacacctccaaatccaaatgagacctggtggcttaaaatgagcgttcgggaaaagcagtagtgaagtcaaaaattaccggtactctggctctctctctgtctctctctctcctcatatctttttatcttaaaaagccaataatcgactgggtgcagtggctcgtgcctgtaatcccagcattttgtgaggccaaggcaggcagatcacctgaggtcaggagttcaagaccagcctggccaacatggtaaaaccccatctctactaaaaaaaatacaaaaattagccaggcagggtggcacgtgcttgtaatcccagctgctcgggaggctgggccaaaagaatcgcttgaaccagggaggtggaagctgcagtgagccaagatcacgccactgcactccagcctgagtgacagagagagactcactgtgaaaaaaaaaaaaaaaaaaaaaagccattaatcattgtggtaagctccacaaggaagaatttgttgcaatcccacctgtgcctggctccagcaggtttccaggaaacatttgttgcatgaatgaacaactgaaaaagggcttcccaggatataagtaagattgcagagagctggatgccatgtaaaggacacagcagagtgcatatacaacatataatcagtaggctgaaaaaggcggctcaggcaggcaccaaagccacactggccattcaaacaaagaaattcagcaaaaggagaaggggcaggaatgtggaaagggcgggccaaattccagaaacgcaaagacatatcagaggcttgcaggcttacatgagaattcctggagcaggaaattaaatgcaagttaatgaagactttaaaagctttattcctgagtgcatgaaacctatgacacgggtttggcagctctttctgaagcagagacatcaacgctagggaagaatgcagggcacttggtatcacctaggagctttaaaaatacagatgccaggccgggcacgatggctcatgcctataatccagcactttgggaggccaaggcagacagatcacttgaggccaggagtttgagaacagcctggccaacatggcacaaccccatctgtataaaaaatacaaaaattagcccagtgtggtggtgcacgcctgtaatcccagctactcaggaggctgaggcagaagaatcacttgaacccaggaggcagaggttgtggtgagccaagatcatgccactccactccagcctgggcaacggagtgagactctgtcaaaaaagtaaaactaaaaataaataaaaatacagatgcctgagctgcatgccccaggattggattggattggtctggaggtggcctgagcatcagggtttttaatgcctctccctccctccggcccagcaagttaagtctagtgaacactgacttagaggttagccaactcatactcctctacaaatgaagacactgaggcttggaaggagaaggagcccaggatcacccagcagatgagaggcagtggtcagagtggagtctggaggccagcgctggctcccgggccctcactctgactctgctgccccagcccctggacctttgcggaactgggctcctaggctcaggcagctttccttctggcttccccttctcctgcctataggtcagcatcacggtgatcgaggcccggcagctggtgggcttgaacatggaccccgtggtgtgcgtggaggtgggcgacgacaagaagtacacgtccatgaaggagtccactaactgcccctattacaacgaggtcagtggccctgtggggaaaggagcctctgtaaatgtggcaggagggtgggtcccagtcctccccaggagaaacaggagtggctgggagtcaaggagcacacacggctaccagcaggggtgacccaccctgttacaacccccaggacactgacaaacagagccacatcctctgaatcctctgaaccccccagtctagagcgcagactgacactggtctttgaagtgtgcaccacctgggtgcccctgtgcagaccccagcagtgcctgtgaaagaactgcccccaccccactccccaggaggcctggtccccactgttttccaggccagagcccaaggacagggctgcctcatttcaacccatggcgacattggcaccattagtaagcactttctaccagccaggcatgctcctaattgcttctgaactggaccatccgaagttgtcactatcaatttccttttacacaaggggacagtgagacttctgaaggcagaccttgtccaacctcacagtgccagcattgccgttggcatgctggtggggttctgccctcttggctcggctccttcatggttgcctgaacttctgtgggtttccctccagagcactggccttgactttggggtgtcagagagaaaacatttggtacccactcctattctttccagccatttgaggccacatcaagggtgagggagctcagagaccctctactccaatctccccatcttacagaggaggatactgaggatccatatggaagggccttgcccacaatctcagagagtgttgctgatggagcaggggccaggctgcccacccagcttccagcccagggctttggccaccatcacaaatgtggcaccttggttcccaggctccaaacaggaccccatcataatcagctctggggagggatatgagaaatacactcactcatccagacccaaataatggacttagaggcatgaagaacagcggaagtgagacttctaataacggtcttgaaagacggagtgtctggtaggcaggcacacccggggcagtcacaacatgtaatttatctcctagcatgcatgtccctcccccagttccccattggtcaagtactacggggttacaatcttccctgacatcgcctaagcttcattttcccccttataaggttatacccgactccccttccccatttaagtttcaatttcccaataacaaaacctttttcccttttatgggctgacctctcctctacattctgttcacttattgtggcctaggtgcataagccatgtggtttgttacattcgcaggttggatgccagtacttagacttatcatgtcttgaaaatgggccatttaaaatgttttctcaccaggatgcccaggcctttcccagatgcctgagcacacatcagactaacccagaagccactagcctgggctctgccatccctttcctggagggttccccagtctgtttctcctggtggctctaggcagtgaggggtgccaggctggcccaagtaaggcagctgagttccataccctgaggtgggtgaggactgaggtgtcccctgtagcttgggggagggcatttctcaggccgctctgagagtccttggactgtgcacctgcaggaagaaaacccaggcccacctctgcccttcagcccaggcctggccgaaccctcctttgtgaccacaaatcaactctgctctcccagctgctttcccacaggcccccagagctggacaacctgctcaggacccctccagccccaaggacattcaggattgacatctctggccttacgttaggacacatcctgactggacaagcctctgcctagaaaagcatctgtgtccccatgacaggcatggagacaggtccccgtggcccctgtggttattcgatagcagtgaagccacttttgttgacttaagggatctccctccaccaggcccacgcaccttgggttccattcaaattacttcctctttcccaagggcacagagctgctctccccactctgtggctcctccagaaaactcccactcacctggcagggcccagctccagtgttcttactactgagcagccttgcctcctgtgtctgggtcagaggtcagcactcccctttctctgcagtgttaatgtcccagaattgaggttggtcctctgtgtctctgtcctcctggtggactggaggctccccatctcctgcctcgctgtatttgttcagagccaggcatgtactcggaggggttcagtaacactcacccaaaggaagacacaaacatccacggagcatctgccgcacgccagacggtggcacgtggggcaagatggaggctgctgagatgaaggaggcacagtttccaccctgcacaggtcccttcctcgtttcagcctagaatctttctaaattccctatttatatcctctaagactattcattctgctcatcttcagatgattttaaatgtgtctctgatcacatttttgttctttttcacaaacctaaatagctctgattttgtttctgtttcctctaaaccagggtttctcaaactcagcactgtggatatcttggactggataattgtggtgggattgtcctgtgctgtgtaggatgcgagcagcatccctggcctctacccagtagatgccaataacaactccccttagttacagcaaccaagactgtttccagacatgccaaatgtcccccgaaatcgcccccagttgagaccaccattctaaactatcttgctatgattccttccagccccaaatcagcctttccagccccaaagctttctttcccttttcttatctttctatgccacattccttttcaatgaagggcatcctcctcgtcgtgggaatgtattatttctgactaattatctgagctggcaggaaccttcctttggctccattaaaacaacagagggaggtgggagcaatcaacatgacttagcaggtatctaagctattaccaaaggaaaatatgctcaggaaataccaggaatttgattgcagacagctcagagagttcgggattctggccctagctcagctagctcactcccctggggctggcacagctgtgggcacctggcctgatcgccctgcctggccctgagcctacctgtgtgcagggaagctcacaacctttgcccttccagaacaagctggccattcacaaaccagactaaggctccttttctgtgtgtcctgtgtgtgcatcaggccccgccctgggcatctcgggagtgccgccatcttccctcctgccaaaaatccacctctcccctttgccttggatccttctctttctacagctcaaagaacctgacattgcacagcccaactctgtctttgtttttattccagccccttctcctttgcctgtaaggtgttctactccagcatatgctaagtacaaccatgaagacccatgtgtgctcaaggacaagaactaggagtctgtcacctctctctgggcctttcctcattcccacacacctctccagtgacctcatttttccctcctcccctccacagtcagaccacttggcttgttctcacttcctccccgcagtcactcagtctctgcagggtttccgcctctagatgtcattgacactgctctcctcaaggtcaccaaggaccttgctgtttctgagtataatgtccatgtcttcctcctctcccttgatcacccagtttctttcatcccactgcctgctgctcctcttgggggcccctcaccccactctcctgcttcccctgtctctccagttccatctccctggcctgacttcttggctgaaaggccatagcctcttggagccctgacctgggcctacttcccctcccatgctctccccaggtacctcctccatccccaaggtgtcagttaccatcttgtgctgatgatttccaaatccatatccccacccgcctccccagagcttcagaaccccggccagcacaccctgggcctgttagtgtcgcgcacagcctgtttaccgtgtgcttaccgtgggtgcacacctgggttaaagatttcaccaggttgtctcattgcaacttcacaaccacaccttgaagaccgcgtgtgaatggcacccctggagcagttcagcacgacagccctggatcatatctccacattcatagtataataggtaaactgaggctcaggcaagaaagtgattggcccagcagtaacagccaggtggggctggctctgaagctttaccctcagcgctcaagggccagccccccgcagccaggagcacgttctcttcgaacatttaccctaagcacgttggaaacatttctcctttcttctcctttctcccccaccacagttcaccaaagcagcagcccctctacttactgccccacaccctcatcctcagcgcctgcacacccaggccaggggaagagatggggactgcaaatgcgcatggcagcccacaacaccaaaggacagtgcacgcccatggcatttcacagggactgccaactaagtgctttggcacaccatggttcatctgctctgaggcttgcgttattttacagcttcacctctctgaatttgggatgtgtctcctaggcagccttgtggcttcatggcaatgtccatgtggcctgttaaaccgtagtatatcttacagccagtagccactttagatttggtaaattatgttacattgtctcatcagagcctcataacaagactctgaggtgggtgtcattattcccatttcacagctcaagaaactgaggttcagagaatgtgttgctcaaggccacacagctaggaaggtgcagagcggggactagaacccaggtctcctcgctccctggccctgtgcctcttctgagcacagtacaagggcataggctcttccacctactgttcccagttccttccccaccccacactagccagcaccagctccacctaggggatggggctctgcttcctaccacccaccaccagggtcaatcaggatcagacgagttgcctctgctgctcctctgaactttggggctcagggcaaatggctggggtgcagacaggcactgcgaggagggaggggcccagcactgcctaggctgttgctgctgcccacagtgacagcaggcccggatccttcccctctccagtacttcgtcttcgacttccatgtctctcctgatgtcatgttcgacaagatcatcaagatttcggtgagtggggagcagcccctggcaggcaggaccactccctcaaactgcacctttgtgcacacttgagaggagctccctctgtctagacctgtcataaagaggcagtgccgtgcctagacacatggctgagcaagtggggcacaggctggattctggcccccacccaccccctttcatccagtgcctctgaatagtgtattcgcccgtacacggtggccagcgagaaactggcgtgggcaggaggagctgatgctgagcctcagcaagccaccccactctgccaaacgccctcccgcttatcataaagctcaggtcccaccactgccccgtggaaggcctcaccctcgcccagcctgacgggtgggctgtggttctgcctgaaaggtgattcactccaagaacctgctacgcagtggtaccctggtgggctccttcaaaatggacgtgggaaccgtgtactcgcagccaggtgagtacctgcgcatggccagtcagtcgaggtgtacacggctcaggagcatagtgcacagggcccttcccgctgtggcagttcctgggaaaagcctggcaaggaccacagtctgacgactgttagtacacacagccatctggcctgcggagaagtggcgcgcacagtctgtacacaaatgcagtgagcaactgcgcacccagtctggtgggttctcattcataattaggtcggtaactccacccagagcctggaaggagctccatcgcacgctcaggagcgcatggcaggctggcgcatcactggccataggcaggctgacgggtagtggtagagaatgcagtgagagaaacccgtcacagcctgcagaggggctgtgcctcctgggctggcacccgctgagcagaaaggaactcccttccacccctcacaggaccctgccatcccctattacagttgaggctcagagccagggcttgccccagctgcacagctggtcaggggtgaagtcaggctgcgtgtccccagagcctcgctgagctcactatccaatctgaacgcggtgatgctctcaatccagatgtagtgtggtggcctctgagggactctggtctctgaaaacacttcttacaagagccccaggctcttgggcagccatgtgggctccatggtgtcctgtaggccaacaccaatggggttggcaagggaaccccaatgggtggcccagagggcttgtgaggtgggccaggcagaggaagtgcctcagtctgccagatgacagctcaccccgtgggcaggttaggggccatcccgtgtccctgaagtgaatgcactgctcagagtgctgtaatgatcccattagtccctttgacaatgacaacataatttcacccaattgtcacatttgaccctcacaaaacagtaatgtaggcagcagcgtttcttcccattttgtaaatgagataaatgaggctaagagaaatgaaggggcttggagataccactaaactagtaagttgaacaaattggtgatcacttgtggtcaacctaagagatgtccgctggcacgcattacaactgtgactcagaccagggaatctaagtccaataccaagattatacatataaaaatcacaagatcatagaacactcaagctgcccaagacctgaaaaacatctagtccagcctctctgtgaggataaactgaagcccagggtgttgaaggggtttgcccaccatctaggagtagcacccctgtctccggctcccagaccagtacctttgccaccaccccacacatgccatggccctcagcagagggcagccctgctgaccgtcagtgctgtggggagcagggaagagtcggcctcctgccatgttgcttccctggaagcatgcatagctgtggaccacttgcgtggaatgactggcatccctgaggatgagctcctcccagggctcagcagtggtcctggtaccattggcgggcctgaggccaagagccaagagtcagggggtagagaaaaaggcagaggttagtctaatatggacctctgggcttctgggtagtaaagtcctggtgaggaaaccaccagggcatcagtaagtaccagacattgggctaagctcactgtcccagcaggactcaccctcacaaccccatgtaggcatcattcccatttcaccataaggaaactgaggctcagcaggcttaaagagctggtccagggccacactgtgaataaggagcagaaacaggatgtgggcccaggtctgggtgagaccaaagcccaggtctccactcaggtaacccagcttgagattcgctgctcctgttgaatccagccctaagcctggtgccctctcagggacagaagagcctgaagtcacacgggtcctagagttgagacccagtgtcttgactctgatgtctccagtttggctggggcttcttgatgagtccttggttccagccagggcactgttggacagcatgctctcagagacactcctgggtgctgctgggaagctttgggtggtgtcaatatctcttggaactggaaggggtttcccgagagacactcttctcaccctggcaggaccacatttgtcatttgtaccaccagatgcaacagcaggaaactgtttactctttgctactctctgttgggagtgaggatgggccatacactcatccttatagatcacagaggaagtctgggccatacactcatcctcatagatcaaagaggaagttggggccatagccgtacacttatcctcatagatcatagaggaagttggggccatacactcatcctcatagatcatagaggaagtcggggctatacactcatcctcatagatcaaagaggaggtctgggatgcagcaactccccaactgggctagccttgactggcaggtgtcagccccaggctgaagggaggtgaaatgatgtttcaggctggtaagcatatagctcagggtctcatgtggtccttgtatctctagcctgagatcacacagtattgagactagaagggcctcagaagtcatcagtcaagtgttaacctgatgtagggacccccacagcaccatctctgattggtcatctaaccttacttagtcctcccagaaatggggcactcactacctcttattttagatatcttcactttctttgggtcatctcaaaatctgttgccctgtaaccttcacccactttcacaggtctctctttcaggacaaaaagaaaaatagcctttaaatttgaaggcaaattttacattcctcctgaatcttattctctttcctttctaaatgtccccaattcatctaaccatgcacacctctatacatctaccccgtatccatccatccactcacccacccatctacaaatccatccacccacctgtccacagatccacccacccatccatgtatccatccatccacccacccactcatatatccattggtctacccacccacccatccacgaatccatccacccacccacccatccacagatccacccactcacccatatatccatccatccacccacctacccattcatatatctacccccccgagccatccacagatccatccacctacccacccatccacagatgcacccacccatatatccatccatctacacacccatccatatatctacccacccacctgtccagatattaatggctccttctatccaataatccatccaccatctgtccatctatctctcagccagccaggcagctcaccacccatccctctgcccatttctgcacccatttattgagcgatctgtctatctcctcatccgacacacatctgctctggcaagacctgaagttcctgggatacctgggacatggcccctaccggaggcctgccggcctggctgaggctctccagtgactcctcacccatgtgccttcctgccttcttgccttgcttgtccctctcttcagactctactgtggcattatcttttctgagacactggtggcctggctattctcagaaaggccaacctctgcacacagcccctaacatctctgggagcccaccagggccacaggcttgcaggacgcaggcctgggctacagtagaaggtggaagaggagggagtgaaggagggagtgaaggagggaggtgctgagtcccagagagttcggtgcccacagaacatcctgggaagcagattcctaaggcacagtgatgcgcttccctgtgcttgcccactgggcttaaagtaaacctgaaggagcaaatccttcctaaagtgcctccttccctgacatctgtccttccctccacacagtcgtaggccataggacactgggatgagactgccagtccctgtctttaggagactctcagtctaaaatcagagacaaacaatgcccagatgagcacagtgcacagtgagatgggaaatgtgcacagagagcacagagaacaaacaccaaagagcccaggatcaactcttctgagaaagtcagggagggctgcatggaggagaaacttgagcaacatgagtagaagtgtacaaattgaacagggagagagagagatggaggtggagagagcaggaatgagggcgttccaagctcaaagagcagcagatgtaaaggcatggaggtataaaagggcaaatccgcaatacatgttcagcaaggaggaacacaaggctgggtgggctcagcagagtgagtcagggagcactaaatcaggagcccacaggccgtgccttttgtctttaccccaaggcactgggaagccccagaaggagctgaagatggggagcaggagcatgagcctctccacctgggaaggccctgtgggcggctgtgtccttcacagctatgtgaaggctagctgactggggtggggccatagaagaggccataggcagaaagaacccaattaggaggaggctgtcgcacttccaagtcacaccactcatgggacgtatgtccatggctgggccatccacccactgccccagctccagaggacctcagactctatcaccccctggactagggacaggcagagctgtggtcccaggtctcgggactctaggggccaagagaacatttggctctgccaccccttggcctcccctgagcactgggagacgccctgggttgggggatctggtgcagtgctccccccctcaccactgcagagcaccagttccatcacaagtgggccatcctgtcggaccccgacgacatctcctcggggctgaagggctacgtgaagtgtgacgtcgccgtggtgggcaaaggggacaacatcaagacgccccacaaggccaatgagaccgacgaagatgacattgaggggtgaggcccagctaccccagcccctggagtctgagccagcccttccttcccccagggagttctcgatgagggtttgctcagagtacctgccacccatctccctcaccctgctctcgcccactctcccaaacagccccactcttccgaggcagggcaggggcagcaggtgatggaggatgactgagaataacagtcctttgacatcctttctgccagtgagaaatagggtgggaagagtcaatgctggcagaccagagccagcagctgctgggtcctgagtacagcagcaggatagtgctgggagagccccggtttcttctggtgtgccaattccaggcagctgatagcagctgttgagaaatattctgtgaccttgtctggagtcagtggatgaaagtgctgggatcaatgaatcctgtttttgtgagctggaggctactatgaagtttttgtttatgaaacaaaacttataggcacagtactataaaacactgatgataatactaagaccatatcccaatgcacaatctacaaagcactcatgtgttagcgtgcttgagccaaccatatacttgggaggtgggtactactacagccacctcaacagtgatgaaatggcagctcagtgagacgggagatttgcccagaattccacaaggggcaagttccatgaacgcaagtgtctcatcccagcctagctcccccagccgtcccttagactgtgccaggacccaggggtgtgtagatgccaggacgggggctggggacctggacctggccacaatggccctggctgtatgtactggcaggaacttgctgctccccgagggggtgcctcccgaacgccagtgggcccggttctatgtgaaaatttaccgagcagaggggctgccccgtatgaacacaagcctcatggccaatgtaaagaaggctttcatcggtgaaaacaaggacctcgtggacccctacgtgcaagtcttctttgctggccagaaggtactggggtatgaggtacaggaggcgggggctgggtgataggcatcacaaatgcaggctgatgggcatggggcctggggcagctgggcgggtaagaaaaggctggaaatcatgtcggccagggatgggcttagaggatcctccctgcctcctggagtccttagactgagagctacgcagggggcatgagagggaggagaggttgggggtgtgggaagggtgaagacaagtccacacacaggcatgcacgcacacatgcacccactcacacacgcacgcacacccactcacacacgcacacatgcacccactcacccatgcacacatgcacccactcacccatgcacacatgcacccacttacacagacacacacacccactcacacacgcacacatgcatccacttacacacacatgccacgccctcacccacgctcccccttccaccagggcaagacttccgtccagaagagcagctatgagcccctgtggaatgagcaggtggtctttacagacctctttcccccactctgcaaacgcatgaaggtgcagatccgagactcggacaaggtcaatgacgtggccatcggcacccacttcattgacctgcgcaagatttctaatgatggagacaaaggtcagcagcaggagactgggtgtgctggggggcagggagtggcctgaagggaaggagtaagtgagaccccctctcttcacaccaccaccatcaactccggacctcagcctcacatgtgcttccagggccttgccagcagcccctgcctcaaggggagggtgtggatttgtggctcaggtcggctcagagctggcctgagcccagctgattggatttgacagttagtagttgtgtgacctgttttcccatttttaaagtgaaaatagtaatgattatatgatacaataattatagtatgaataggcatatcattgcagtgtatatactgcatttgtatataattacagtgtgtatatatgtaatacttaatagtagtgcctatctgcagactcgaagggactgaccacctcctaggatccctgccctgtggtgggttccaaggacatagagtgagataagaatctattcctggatcaaagtgctcactgtgtattaaggagatagatgtgctaccagatggtcaaaacataaggcagaagacacaaaaggccacatgttgtctgatccatgtatgtgaaacatccggcaaatccagagacagaaagtagattgccggtttccaggtgctaatgggaggggattgggaccaactgctaaataggtgcagagtttcttatgagggggtggaactgttctggaattagatgatggtttttaacatagtaaatatactaaaaaccactgaaatgtacactttaaaatggcgaattttatatcatgtgaagtatatctaaatttttaaaatactataagtgtgttttttaaaaaaggcagaataaaaagcaaatgaaccaaaaaagccggatcttgcgacccctgtcagagtcctgacagatcttagccataagagaagggacttgtgcctaggaattgtgaaggcttcgtgaggaagcagcatttcacaggcacagatggacaggaagggaggggtctgcaccagcagggtgaccatggtgggacagagctgcaaaaatggcacagaaccgaaggtcatgctggggacttggaaggactagctccgtcctacaaatagactgttggcaattcctactccaagttgcaggaagcagaaagctacactctgcttccccgccacttccagctcaggcctccgcagggaagaaatagacccaagagagtactccaccccagcacagtataagaaggctgccccacatctgaataacacacatgaagttctcagctcagcacgcaggagctggaggccagggacccccaaaagaggcccctcttccccagggaaccctggatgtgatacggctccctcatttttctccccattgccacaggcttcctgcccacactgggtccagcctgggtgaacatgtacggctccacacgtaactacacgctgctggacgagcaccaggacctgaacgagggcctgggggagggtgtgtcctttcgggcccggctcctgctgggcctggcggtggagatcctggacacctccaaccctgagctcaccagctccacagaggtgcaggtggagcaggccacgcccatctcggaggtgagaccccaggcactgtgctgtcccccagggcctccagttcagcctccttccccccaaaacacctgggtcccagactttggcctgctgctgccctgtctatcggaggagtcagaccaaaggatgaggctcctcgccaggaagcagaggctcccactcagccccccaataggactctgccctcattcactgcctgtctgtgctctatctcacgatggccaccaggtctcacgacggtgccacccctccacccctcttcccagccatggctgtccctgtggtgtctggagccagccctgcttccatggatatccaggctggagggccatcggggtgtgggctgcctggccccaaagctgggtgggatgcccccaccatccacccccagggcctgtctgtgagatggaaggaggcctggcccccgaccttccacccctactcaagctcaagaatggtttgaactgcctccccacagagctgtgcagggaaaatggaagaattctttctctttggagccttcctggaggcctcaatgattgaccggagaaatggagacaagcccatcacctttgaggtcaccataggtgagtgctgggcccacggggggcttcaggcctaggtgagtgctgggcccacggagggcttcaggcctaggtgagtgctgggtccacggagggcttcaggcctaggtgagtgctgggcccacggggggcttcaggcctaggtgagtgctgggcccacggagggcttcaggcgtaggtgagtgctgggcccacggggcacttcaggcctaggtgagtgctgggcccacggggggcttcaggcctaggctgcaggtggtaagtgtgaggctctgcacctcagccctgtcctcattcctgtaggggatgttgacccctttcccctgagaggcctcaagcacccaagaaacacctttatgtgtgcatgtggtagaccatgctccataaaggggccgaccctcagctccacctacagggtgaggctgtgtttgggacctggggcagagggcgaggagaggcccttccctgggctgcagaggagagagtgggaactcaggccgcggcctgggccagggctgggcctccttgcactcaagtatcatcaggactccctgactctcagcagagtgggaacacgggcacctctctcgggctaatgctgtgtcacatccgagccccattccctgactctccctcttccttttcccaaatccaaggcagcaccgaattggactgtgggaggggcctgggggggaacacactctaggccttctgggcccgttctgcctccaggcaactatgggaacgaagttgatggcctgtcccggccccagcggcctcagccccgcaaggagcccggggatgaggaagaagtagacctgattcagaactcgagtgatgacgaggccagcaatggcggggacctggcctcagtctcctccaccccaccaatgcggcccctggtcaccgacaggtgggtccaacctcccatccccctgtggcctggccctcccacctccctgggcccccaagacctcacctcccacctctgcccaccccaggaactacttccatctgccctacctggagcgaaagccctgcatctacatcaagagctggtggccagaccagcgccgccgcctctacaatgccagcatcatggaccacatcgctgacaagctggtcagggccaggccaggggccagcagggctggggtcctgggggagagggtgctgtcagagggcattgcctgcaacacacaaagctggtctgcccaggctgcaggaatggccccagcaggacctctgttcccatcctcagccccaggtcccagggcacagacaagagcaggagccacctctagtcactgcagcctccagcgaaccccggggcaggagtgttgggttccctgatttttccagaaatcttaaaagcaaggctagggagacagttgtggtggctcacgcctgtaatcccaacactttgggaggccaaggtgggtggatcacctgaggtcaggcattcgagaccagcctggccaacatagtgaaaccccatctctactaaaaatgcaaaaattagcagggcttggtggcgagcgcctataatcccagctattcgggaggctgaagcaggagaattgcttgaacccatgaggcggaggttgcagtgagccaagatcgtgccactgcactccagcctgggtgactgagcaaaacttcatctcaaaaaaataaataaaataaaataaaataaaataaaataaaataaaataaaaaagcaaggctagggaagggaaatggggagaagggagaagcgagcagtgtctgaagctcaggagctgccccctcctcctccgcccacccctctccctgcctgacccatgggaactgactgggcgaggagcgcagctgttggcctgagacctccttctccccaacctgggggagcagggaccagcagataatcccacccttccctgagatgttgctgttccctgttgaagttccctgaagctcagccagctcatattttataaaaatgaattaaaacctccaaaaaagtcacagataatatgaggtttgctcccagccccctgccagtgtcctccttgtcacccctgtcttgtgactataaccacaattaaagcccacagcctttgcagtgtgacctgggcctgcagttgtctgcaaggcttcccgctaaggagtggggtactagctgacctgtgtctcctgtgggacctgggtctcccagccctcccagtgctctcagagccagagccactccctcttcccccaggcatctgttcccatgccctgccacaggccccagcattttggagtgacgtcaggatcctgggtttccctctgtctctggccagccatgagccccctgcctaggcctgagttctgcccaggccctgtgagcccaccagaaccacagactcacagtccacaggtggcttcttccttcaggaactgaagaacccacgaacaccaacatctccaggttctgagaacagaacttgggaaattgatgacttcctcataatgactgatactcaggacagccctagcaagagctcccagatcatgtggtccctcactcccctgatcaatggggaggagacatttaggaaggctggggaggctggggaggcggggctgtggcccagcatcactggcactcctggttcacaggaagaaggcctgaacgacgtacaggagatgatcaaaacggagaagttctaccctgagcgtcgcctgcggggcgtcctggaggagctgagctgtggctgttggtgagaagcggggggcggcaggttggggcaggacaaagcagaactggacaaaggggaccctgccagggctgggtagatgaggaagaatctacagagcccctgcttgtcaggctcgctaaatcccagctccccctatccccagccgcttcctctccctcgctgacaaggatcagggccactcatcccgcaccaggcttgaccgggagcgcctcaagtcctgcatgagggagctggtgaggacgcggctggaccgcagggactggagggagggcctggctgtgagaaggtgtcacagctgcctctgtcatggcccgagctgtcccccagtagctgggctccattgacaccccttcccacacaggaaagcatggggcagcaggccaggaccctgcgggcccaggtgaagcggcacacggtgcgggacaagctgaggctgtgccagaacttcctgcagaagctgcgcttcctggcagacgaggtgcggcccaaggcgagggggctttgccttatccagggttggctctctgaggtccttcaggctcaggggactcagtcaggaggctggaccctcttacccgttgcccctggccactccccaccccaccagccccagcacagcattccggacatcttcatctggatgatgagcaacaacaagcgtatcgcctatgcccgtgtgccctccaaggacctgctcttctccatcgtggaggaggagaccggcaaggactgcgccaaggtcaagacgctcttcctcaaggtgctggagggggcaggatggatgggggcctggatcctttcagaggagcagcagctccacctggggctggagggcctgagtgacagagtgaggccttcaagcagtaggtgctcagagaagagctgagaatgggaaggaggtgggggaaggggtgcggaaggggtaggacggccccctgcccatctccctgtctccactggaccccagcccagcaggatgctgtgaaggggcagggcagctctgaccagggcctccgccagcccctgccccttccccaccccgtgggccctggcagccgtcaggctcctggtgaccccatgcccacccccagttgccagggaagcgaggcttcggctcagcaggctggacagtgcaggccaaggtggagctgtacctgtggctgggcctcagcaaacagcgcaaggacttcctgtgcggcctgccctgtggcttccaggaggtcaaggcggcccagggcctgggcctgcacgccttcccgcccgtcagcctggtctacaccagtgagtgaggacccctcactcgaagcctcacctgggaggggccggaggggctgcccatcccagaacctcaggctgcccttccccacagagaagcagacgttccagctccgagcccacatgtaccaggcccgcagcctctttgctgccgacagcagcggactctcagaccccttcgcccgcgtcttcttcatcaatcagagtcagtgcacagaggtgaggccctcgggggagggagtggctctggctttgagagtaccgggaagcctgtgagcctgtggggcctgggacctgtggagcctgtgagcctgtggggcctgtgagcctgtggggcctggggcctgaagcctgtggggcctgtgagcctgtggggcctggagcctgtggggcctggagctgtgagcctgtagggcgtggagcctgtggggcctatgagcctgtggggcctggggcctggagccctgtggggcctggggcctggggcctgtggggcctgtgagcctgtggggcctggagactgtggggcctatgagcctgtggggcctggggcctggagccctgtggggcctggggcctggagcctgtggggcctgtgagcctctggggcctggggcctggagcctgtggggcctggggcctggagccctgtggggcctgaggcctggagcctgtggggcctagagcctgtggggcctggggcctgtggggcctggggcctgtggggcctggggcctgtggggcctatgagcctgtggggcctggggcctggagccctgtggggcctggggcctggggcctgtggggcctgtgagcctgtggggcctggagactgtggggcctatgagcctgtggggcctggggcctggagccctgtggggcctggggcctggagcctgtggggcctgtgagcctctggggcctggggcctggagcctgtggggcctggggcctggagccctgtggggcctgaggcctggagcctgtggggcctagagcctgtggggcctgtgagcctgtggggcctggagctgtgagcctatggggcctggagcctgtggggcctggagctgtgagcctgtgaggcctggggcctagagccctgtggggcctagagcctgtggggcctgtgagcctgtggggcctggggcctggagccctgtggggcctagagcctatggggcctgtgagcctgtggggcctggggcctggagcctgtggggcctggagctgtgagcctgtggggcctgaggcctggagcctgtggggcctagagcctgtggggcctgtgagcctgtggggcctggagctgtgagcctgtggggcctggagcctgtggggcctatgagcctgtggtgcctggagctgtgagcctgtgaggcctggggcctggagccctgtggggcctagagcctgtggggcctgtgagcctgtggggcctggggcctggagccctgtggggcctagagcctatggggcctgtgagcctgtggggcctggggcctggagccctgtggggcctagagcctgtggggcctgtgagcctgtggggcctggggcctgggagcctgtggggcctggagcctgtggggcctggagctgtgagcctgtggggcatagggcctggagcctgtggggcctgtgagcctgtggggcctggagccacaggtcagccagtgccctagtttctcaggggaagccctgcagataactgtagacccgggtcacaccggaaaggctacgggctttaattgtggttatattcacaagacagggacaacaaggaggacgttggcagggggtttggggcaaaccttacactggccttgattttaagatttctggaagaatcaagaaatctgtcactcctgcccccaggttctgtggaagttgagtgagtaggggcagctcctgttcttgcatctgcccaccatctgtcacttgtcacctgtctccccaccccatgctgcaggtgttgaatgagaccctgtgtcccacctgggaccagatgctggtgttcgacaatctggagctctatggcgaagctcatgagctgagggacgatccgcccatcattgtcattgaaatctacgaccaggattccatggtatgggtgggctctggtgccagggacctcagcagcaccacacctggcccttgttccctgcactccacctgcacggaggctgtgccggctacctccgccacccacccgcagagttccttggccaggtgctgactgggaagctgggagtgggggctgacacccagtccctccaggtgcctcctgccagcttgcggcagcctgaccccttcccaggccaggacatcctcacctcctgtcaccaatggtccgagccctggagatgtgctggcaagtcctgctgtcactagcctcctcaccccggggcttcccgaaccccgcccacacttaccacaaccagtaacagccttgccgtcctccgtggagattctggagtaggaagtaagggattggggtgactcccgagagttagtgagccaccttctcacgcaccacctcagctgcggaggtgccagatagccctggactagacgtaggaggacatcatgtctagtcctgagccggacatctgctattcactgactgcttggccttgaacaagtgtttggtgggccctgagacttggtttccccatctgtaaaatgcggtgatcacacctgtcccttacaacaactcatgtggctgtggtaaggactaaacgagatcacaggtgtggacagcaagcaccaagaggcatctgggttgtttgctgtgtcagggcaaagctgacttcatgggccggactttcgccaagcccctggtgaagatggcagatgaggcgtactgcccaccccgcttcccgccccagctcgagtactaccagatctaccgtggcaatgccacagctggagacctgctggcggcctttgagctgctgcaggtgggacacagggaagagaggctgaggcctggcagctggaggctgggaggaggggcctagggctggtggctggggcctggggttggggcttgggggtgggacctgggggttggagtctgggacctggaggctggggcttggggctggggcttggggctggggcctggggctgggggctggggctgagggctcggacctggggcctgggggttagggcctgggggttggggcctggagctggggtttaggggtgggccttgggggtaggacctgggggtggggcctgggggttggaggctggggcctggagtctgggacctggaggctggggcctggggctggggtctgggactgggggctggggctaagggctggagcctgggacttgggggttagggcctgggggttggggcctggagctggggcctggggcctgggggcctctctccttcccatcctgaccgaagctgggggagtggttcttggggggttttccctgtctccccagatctcatggcaaacaatgcatggggagagagaccctgtccctgggctccccagtgtgtgacctgtgacccccattccccagattgggccagcagggaaggctgacctgcccccgatcaacggtccggtggacgtggaccgaggtcccatcatgcctgtgcctgtgggcatccggcccgtgctcagcaagtaccgagtggaggtgcgagggccctgtgtggcctttctctttcagatgaggaaactgagggcccaggaggggaagtggtttctcatccccctcccatcaccatcaccaggagccagcagcagactcaggctcctgccccagcccagggcctgcccccgtctgcaccaagtcgcactcccatgtcccaggaccgtgcccagccctcctgtctgcacccctgactctgcaccccttctctgggcagccccactctcatctctggaggatgcccctcctctgctctcctggccctgctccggccctttgaaatctggggtgaacttctgcccatgctactgcccagttccttctcagatggtccagcgcccctacagcggctcccttgactaaggggctctcttctctgcacgcccctcaacctctcccaggtgctgttctggggcctacgggacctaaagcgggtgaacctggcccaggtggaccggccacgggtggacatcgagtgtgcagggaagggggtgcagtcatccctgatccacaattataagaagaaccccaacttcaacaccctcgtcaagtggtttgaagtggtgagtgcaggccccggcggaggatgtcctgtggccagtgtggctccactcagccagccggcttcctctgccccttctcggaggctcaggctcctgtcaccaacaccccaggacctcccagagaacgagctgctgcacccgcccttgaacatccgcgtggtggactgccgggccttcggtcgctacacactggtgggctcccatgccgtcagctccctgcgacgcttcatctaccggcccccagaccgctcggcccccagctggaacaccacgggtatggccacacccaccctgccaccaagcctggctccatgccacccagggaagggctccaggtctcagtccagtccaagctgtggccagagtttgctccttgggtctgagggatggcacagaagaaggtccacgctggtggccaaggaaggctgcccagggcgaccccagctctacggccagagagggcagagctggagacagcctgggagggcctgagggcacaaagtcccttgtgctggctgatggagaagacccaggcctctctgccgcctacctcccgccggcctccacagctcccccttctcttgggctctcttcctccctccccatgcccatctttcctcacttgactgccctgtccccctttccctcagaaagttccagaatcagctttagttctctgcaccttcctgccccgccaatctcactgttcctcttgctccttcctctgcctgtctgtccatctgtccatctgtccagtcaggcttctccggcgttgccgtgtgctgtgcaatgggggcccctcctctcactccacaggggaggtcgtggtgaacatggagccagaggtacccatcaagaaactggagaccatggtgaagctggatgcggtaaggcgggtggggtcagtcccccgctggctgggaacgtgcaacttcatgtgacatgtcctgtgaaccagactatctgccctgagagagaaggacactaagaacctcctttggcatgtgactgttgggggctgaccttgattgtgtgtccaaccagctccacctaacactatcctggaatgcacgtgcctgcgtgcatgtgtgtgtgtagtgtgtaaatgtgcatgagtgcgtgcatgtttgtggtgtccatatgtgcatgtgtgcatgtatgtgcatatgcatgtgcatgcatgtgtgtggtatgcatgtgtgcgtgtgtgcatgtgtgcatgtgatgtatgtgcatatgtgtgtgcatgtgtgtgtggtgtgcatatgtgcatgtgtgcatgtgtgcatgtggtgtgcatatgtgccttgtgtgtgcatgtgtgtggtgtatgtgcatatgcacatgcgtgtgtggtgtgtatatgtgcatatgtacatgcatgtgtgtggtgtatgtgcatatgcgagtgtgtgcatgcatgtggtgtgcacatgtgcatgtatgtgtgtggtgtgcatatgtgcatgtatgtgtgcattgtggtgtacacatgtgcatgtatgtgtgcatgtgtgtggtgtgcgcatgcacatgcctgtgcatgcatgtagtgtgtgtacatatgtgcatgcatgtggtatgtaaatgtgcgtgtgcatgcgtgcatgtggtgtatgtgcatatatgtgtgcatgcatgcacgtggtatgcatatgtgcatgtgtgcatatgtgcatatggtgtatgtggatatgtggatgcatgggtgtaaatgtgcatgtggcatgcgtgagtgtggtatatttgcatatatgtgtgcatgtgtgtgtggtgtgcatatgtgcatgtgtgcatgcatgtgtgtggtatgtaaatgtgcatgtgtatgtgtgcctgtggtgtatgtacatatatgtgtgcattcgtgtgtgtggtgtgcatgtgtgcatgtgtgtgtggtgtgtaaatgtgcatgtgtgaatgcatgagtgtgatgtgtgtgcatatatgtgtgcatgtgtgcttgcggtgtgcatatgtgcatgtacacgtgcgtgcatgtgggtgcatgcgtgtgtgtgcgtgcatgtgcactggcatgtggtatgtgtatatgagagacagagtgagccatcacagtttattataatcacctgccataatttttactccaacaaatgacaccataggtaacgattccttatgagatcatcagtgtcctttccaaagggtccttgggttttccattccagccattcacaaatgacacttccctgggctgggtcggaggaggatttccaggtggaagctccttattcctcctggctttcagactaagacccttcatctgccagagagagacctaccacctgggggttgggtgtggaagtggcctacacgctgcagaccctacagggaagggcagaacatgggccagcctagaacacacccccttgttcctttggccacccaaagaaacatcctcactcagaccctttgcagactcaccagtcagaatgctattattaaagcaaagttgaccttgagggcacaggggctgccagcacacagtaatttccatctcggctcctccacacgccctgtattgggccactgcctgccactccaggccccagtgactaattctgcccctgtctccttggttcctctgcagacttctgaagctgttgtcaaagtggatgtggtgagtgtgggggccatgcaggggctctggggtgagagggtcctgtattggcaacggtgtcaggtcaaagggtccagcatcagggacagagccagcccccgcccccgcatgattgggccagcacatctcccccaagatgcagtgaaaaagagctgggtgagtgcaggactcagtgccagtcctgcctgggccagtggatcacatgggcaggtcatgaccctctgtggcccatggcacctcctccattaaacaagaccctgccccttggacataggtggccccacagagccttatggagcccaaggtttcctgctagcagatgacggaatgggtggaggccctcgggattgtccaggcaggaggggcccatgtaggactctggacctggccaacctacaggctgaggaggagaaggagaagaagaagaagaagaagaagggcactgcagaggagccggaggaggaggagccagatgagagcatgctggactggtggtccaagtactttgcctccattgacaccatgaaggaggtgagacctcaggcagggtgaggggaggcgaccccctccacactcagaccctcctgtccagcttctttcccacagcccccggagctgggtcccacctccattcatgtgagcttgggatggccttgtctcacatccttgaaatcctagctcagaactcaccttccaagatgatggtcccatctgccttccctggcttagtttccttttgtcctcattgactcattccacaaatgcctcttgggtatatgcgatgagccaggctccatactaggtgctatgggagccaaaagatgccatacctgccctgatgggcccccggtttactgggcaaaatagacatgtaaacagagacttagaggactatgtgataacaaaggcaaatcatggcttgggggaatcagggaaggcgtccaagaagtgacctttgtgaaaaaggagaaacatgttctcagaggccataagggaacaaatgcttttcagtagtccttacgactcttcttcatactgttttattttacacatcttggtcatcggcacgtgaatgattcttcccctgttacacatatgtgggttccatctgttggccagattgcaagtcccagaaagtgcatttctccgctctcttgtttgtgtcctctgcctgctgcctgcctagctcagtgctctgactggccacctgaccaggaagggcacatgcctgcagttgtgtttccttagtggggctggagctgatccagccacattctctcccaggccctttctgcagcctaagctgggtgtgatatttattagagcacacattaagctgctgtagcaagttagagtgacgtaaacaagacaacagtttctttctcacatagcatctcagagagtgggggttaggctggtatggtggctcagtggtgtcaaggactaagatcctgacctcttgtttctgacatctgtagagttggaggtgactcaacatcatgttctaattcaagtgcacaggaaaggttaaagaggagaggaggcatatgcttttctctttcagggcccaatccagaagttgcgcatatcacttccactcacattgaccagaatctagtcccatagctacacttatctgcaaaggaggctgagaaatgtaatctttagcaaagtgactgtgtgcccagcaaaacttctaaaaaagcagaacagatcattgaggacaactggtagtctcttctcccaccatcaaattggccaggctagagctgcaaaaggctgcctgttgtcttgtctctactcctgcaattttcacagactgccaccaggtggcggtggcgacttaattgaaacccggtttctagttttcagtaagatttattctcgtttccagtagggtggggtgtgctgagtgaaagaaaatatagtacatgttcttactgttatacttttctacattaaaacaatttattaataccactaaaagcaacattaaaatgcactgtattttttaagtagaaaatataaatatttattgcaaggtattgttttttttattattattatactttaagttatagggtacatgtgcacaacgtgcaagtttgttacataggtacgcatgtgccatgttggtttgctgcacccattaactggtcatttacagtgggtatttctcctaatgttatccctcctctagccccccaccccctgacaggccccagtgtgtgatgttcccctccctgtgtccaagtgttctcattgttcaattccctcccatgagtgagaacatgcagtgtttggttttctgtccttgtgacagtttgctcagaatgatggtttccagcttcatccatgtccctgcagaggacatgaactcatgcttttttatggctgcatagtattccatggtgtgtatgtgccacagatgcataaacccctaagtaccactagtcacattgtacaccttataaacttctttaaatcaacttaagcagagcacatggtggatttgaaatgcagtggggaagattttctacttctagtgcattaagactggtctgggtccacagtttggggtcaacagactcctccccaggaaacccaccttctctcctttgcatctcatcttttggcagcaacttcgacaacaggagccctctggaattgacttggaggagaaggaggaggtggacaacactgagggtgagccctggaacctggaactctgcctcctcctccccgccccgggtagctggctctcctgcccacctcaccacctgcttctctttcccctcccgccagtcctcccagccttagtagccagggaagcagcatcagtagtctgtgggctctgagcaagctaaggcccttgtctagggaggcttttactctgaccagttcagcacccacggtgatagacagacatttacagccacagaacatcagagctggaagggacctcagagctcattccatccagcattttccagactcttttccatgaagaaaattatgggtgttctaaaaggaacaaattagttttggtcaaattagtttaggaaaagctgattgaaacagcttattctggtgcaggacttttcagagcctttactgtgcaaatgttattatacatctctaaaagaaagacacagtgtaaaatatttccccagcttattgggtcacagtaccctttcttctaaagcatgccagcagcatctgcacctgttgctccactgcatgcagtttgggaaatgctaatacagagtgttattattatggacaagaagagggaagctagtaaggaaagtgagtggggaaggaactgagtggcaacaggcctccacccccaaacccatgctccttcctgcccctctcttccaaagggcatgatgacagtcttcagacaccttcccaggcataaactcactggggcccccagcacctccatgaggcgggcatgctaggaagtattatctgcatttgacagcacatggacatccgagagttaagttagtaaagcaaattagcgacagagctgggtctccaatccaagccttcctgctctgctcatttctgctccacctccttttctgcttctggccaggcctgaaggggtcaatgaagggcaaggagaaggcaagggctgccaaagaggagaagaggaagaaaacccagagctctggctctggccaggggtctgaggtccctgagaagaagaaacctaagattgatgagcttaaggtaagagcctgggagcaggtccttctagggagtgcgggggcgttggcggggtggtggcggtgatcctgcaggtggggcaggatgaaagccagaaaccaagcagccaccccccaacggcctggtctggctcaggtgtaccctaaagagctggagtgcgagttcgataactttgaggactggctgcacactttcaacctgcttcggggcaagactggggatgacgaggatggctccactgaggaggagcgcattgtgggacgattcaaggtcaggccaggagcacgggcccagcccctgagtacccctcagcccttgccccaccacaggttctcccactcacctcccaccactgccctggtcactccctccagaagccctggactttcccatgactcaccagctaaagggtgaaggccctgccacatcagggtccagccctcccggtgccattagctacttcgaatgccacccctgccaggcaaacctacagcctgacccacatttgtcttgcccagggctccctctgcgtgtacaaagtgccactcccagaggacgtgtcccgggaagctggctacgaccccacctacggcatgttccagggcatccccagcaatgaccccatcaatgtgctggtccgagtctatgtggtccgggtgagactcccgtcgcttcccctccttgcaagtctttcatcctcccatctgagagggaccaaagaagctgcatactggctgggtgcactggctcacgcctgtaatcccagcactttgggaggccaaggcaggaggatcacctgaggtcaggagttcaagaccagcctcgccaacatggtgaaaccctgtctctaccaaaaatacaaaaattagccaggtgcagtggcacacacttgtaatcccagctactcaggagactgaggcaggaaaattgcttgaatccaggaggtggagcttacagtgagccaagatcacatcattgcattccaacctgggagacagagtgagactctgtctcaaagaaaaaaaaaaaaaaaaaaaagaagaagctgcatactgacagccccagactgggaggcaccagggaaatcatttggtctagcctttatcttttctagaggaggaaatcaaggcccagagaggggtagccacttgcctagggtcacagagcaagcctcctgacaggtccagtgttcctgcccctgcccttcactgtcataggaccctcaggcagcctggcaggagcactgaatatgagcagggcatgggagcctgctcaggcagccctcctccccatcccaggccacggacctgcaccctgccgacatcaacggcaaagctgacccctacatcgccatccggctaggcaagaccgacatccgcgacaaggagaactacatctccaagcagctcaaccctgtgtttgggaagtaaggcttcttggtgccctcccctgccacacaccccaacttctccaacccagaccacctctcaccctagccgatccttaaacccttctaactccacccccaccaggtcctttgacatcgaggcctccttccccatggaatccatgctgacggtggctgtgtatgactgggacctggtgggcactgatgacctcattggggaaaccaagatcgacctggaaaaccgcttctacagcaagcaccgcgccacctgcggcatcgcccagacctactccacgtgtgtggggcgtggggcagagggtgggggcagtgtgcctgcttcgcctccactctaaaatgagattcagattgtggtgatttgagaaggtagaaatattgtggtttctgtcccaggccaggcctctgcccctatagtccctgggcacagccttcaggggacaggactgcagatcccaaaacaaggagagggccagtggattgcaggacagcggaggcaggaagaggagagacaagtgggctagggaaggtgggggccagaagaggaggacaggaagagtccccgggggatctgggccagctctgccacttacaggctgtgtgaccctggccaagtcccttcacctctctggttttcagtttcctcaagggagtctctgaggttccagaggagtgggcacagtgaggggatgcagtggggctaggctggggacactgatacgtggtcgaagggccaaggcaggagggttcaacctccagcagccctagtgtctcaggtgagcctggggcccagggcaggaggaatcagactcacttgctgatgagggcaacagccagctttagagaactggccacaaccagctgtcatccaggatggcttagtcctacccagcccctccaagcctgtgtgtcccctcccgcagacacggctacaatatctggcgggaccccatgaagcccagccatatcctgacccgcctctgcaaagacagcaaagtggacggcccccactttgggccccccggaagagtgaaggtggccaaccgcgtcttcaccgggccctctgagattgaagacgagaatggtaatggggcactggagggggacgcagccacctgccccctctccagcaggtttcagagaccaggaggggtccacacttccctggggaaccccacagcctagcctggggtgtcctcagcctaagcctgggcttagtgaccctctgctcatcaccccagagccccgctcctgtgccccgcctctgtgcttccactcctcctccagggcagccccacctgctttctctctgtccaaatcccagggaggtagagaggctatctgcatcccattctgcagatgaacaagccaagatcctagttccagtgacttgcccaaggtcatgtggctctttagaggcagagcaagggcaacggcccaggtccatccggctctaatccttaaactctccttactcctctgtccgtgaggcacgtcccagagaagcagagaatcgggaggtgtccgtgctggtatctgatcactgtcaggtgttgggacaggaagtggattctcccctccctgacccctctctcacagcccagcagggctctccagtcaacttccccaagcagaggaccaagggcacagacctctcttggccctgtggggcagctgagaccctgggcaagccacttctccttctatgcctcagtttccccaacagtgaaaaggaggtggggtaaacaggtgatggcataggggcttctttgtgctcctaaatccctagtcccagcaaaggtctcctggttgtgctgagccatatgtgcagctgagctgcctgtacccacaggtcagaggaagcccacggacgagcatgtggcgctgtcagccctgaggcactgggaggacatcccccgcgcaggctgccgcctggtgccagagcacgtggagaccaggccactgctcaaccccgacaagccgggcatcgagcaggtgacacttgcatggccaagactgggggtcttgggtattggagaccagggattcccaagctgagtcagtaaaggtagaagccaggcctcatgctgtccactgcattccagaaagcctggcaggcacctccccaccaaggcccctcagggtaacttgaatggcaagtgtctttgctttgagtgagaattacatcagctcaggcagagacctaggttgtctccctcagaagctgtgattggctattggtgacatcataggaattcctggcatccaaagatggaaactgatgaactgggtccttgacagaacaaaggttaggagggagaggagagctgatcttcctgggcagagggagaagaccctaggagatctgccacaaccctcttcctcagggccgcctggagctgtgggtggacatgttccccatggacatgccagcccctgggacgcctctggacatctcccctcggaagcccaagaagtgagcgcctcagggcccaatgctactccctcccggcccaccccatcacttcccaccacggcccaacccttcctgtgggaggctcaggcccagatggccttggccagttggcatctctggggcctgggtgtggccactgggccttataggggagaaactgatcaaccaatcaatagagtttagggcctgccctggagagtccccatgcgctaaggcaggacaatgccttccaccctgcgtcagtgagggagatgagccctacacagcacactccggtgcactgcatctgcgtggtcgacgcacccatacacatgcatctcgtgcacacacacacacgcacagcatagcactcccgtgggcactcacacacatgcccacactgacgcactccttcacaacacacagaacccctgggtcgtcctcacatccaggctagtgtgatgttccgccgagttttcttgaagtgcctgccagtaacgtatgcaggagtgagtgcctggaagaggcaggaggtggtggcgtgaaaagaacgcaggtttcccatccgtaaagcggcagattcgagtccagctgccagacagtgactggattcagggacggcttcagggatggaggaagccacacagggtcccactcttgtttccattctcctgtgttgccatcttgaaattctttgtgacaagtggccctgcatttccatttggcgctggccccggcaaatcatgcagccaattctgccaggaatgtcctggaaacctgaggccatgagtcggctgttcagggcctgtcattagggagcacccaacccgctgggccactctgggctcgcggccctgtctgcaatcccaggagagccaggctcggatcaatttttagtgaatgactcagcctcactgttaataattgaaatgaactacatcattcataatgacaattaaaccttgaggggaaaatcctctttggggacaaggacatacagcttccatgggcttcctttgctggctactgggcttaaatgcagacttctcttggaactagcatctgagacagaggctggcttcccgccccctgccccacgccacccccaccgcccacagccatgcgcctggtgggccctctcactcatgcctctgcttcccccaccccgaaccactctagccccagcctggcccaggccccgtgctgaccccaagtctccagggctcctctctacctgccccatcccagccctggcaccctggcataacccccacccgggtctgctaaccagctctctctccctgggcccaggtacgagctgcgggtcatcatctggaacacggatgaggtggtcttggaggacgacgacttcttcacaggggagaagtccagtgacatcttcgtgagggggtgagtgagcagtccctgcatgagagggactgagccgggcaggccctgcttcccggggggcaggaaaggaggcagagggaaggtggctgtgggtgggagaggtcccactggcctggctgcaggtctggagatgtggcgcccacaggtggctgaagggccagcaggaggacaagcaggacacagacgtccactaccactccctcactggcgagggcaacttcaactggcgctacctgttccccttcgactacctggcagcggaggagaggatcgtcatctccaagaaggagtccatgttctcctgggatgagaccgagtacaagatccccgcgcggctcaccctgcagatctgggatgcggaccacttctctgccgacgacttcctgggtgcatagcagggcagggatgggggctcagaatccagaactgaggaggggcaggggctggggaggcaaggacagggagagccccgccctggggggacaaggacagggagagccccgccccggggggacaaggcgttattgcttccggcctgtcagagccagggatgtctgacggggttccgcccccaaggacccacctaaccgtccccaggcagatgtccttagtatcataaccaggctgaccacaagctttggacacaccaaggagggggcagtcagtgctgatgggggaggggagaggctccctaagggagtcgggaaacctccctgggcctcaggttgcttctctgtaaagcagggattccccctaaaactctaatctgcatctgcaagcttgtgggattagcaggactttgatagaatggatgtgtggcagggagtggcaggggagaccccaggagagaccctctggggtgaaagaaggacctgagtaaagcgtgggggctggggctgcccagcaagcccacgaggacacctgcattgaggccagttgctgggagtgaggcaggaggatgagatttgggctcctggaggtctgcactcagcaaccaagggaacgaggagcccagacccccactcccaccccaccccaccccagccctgttcactcagagctgacactgaggtcgccacaggggccattgagctggacctgaaccggttcccgcggggcgcaaagacagccaagcagtgcaccatggagatggccaccggtgaggtggacgtgcccctggtgtccatcttcaagcaaaagcgcgtcaaaggctggtggcccctcctggcccgcaatgagaacgatgagtttgagctcacggtgcgcaccccctcctgctcgggcagtaggcagggctgggcccagctggggtgccaagggcccagcacgtgacttggacactggaacctgtctgtcctctgcagggtaaggtggaagctgagttgcatttactgacagcagaggaggcagagaagaacccagtgggcctggcccgcaatgaacctgaccccctagagaaacccaagtgagtgccctgcctgcccagcccctccccactctggttcttggaggcactggaacaggaaggagacactcctcagacaccccatctcttcctgggccacagcctcattacaggggagcctcctccctgctctctgctggccctgaatcccgcaacgtccctttgaaccagaggatgggctaggagtactggagagcaggacctttcctgggaaaggccccatttagcagagataaactacgctcttcccttcctagcttttgcagaagagccagctccagtggtggcctctggggcctcggccagccttgatggccagagggatgcctagaactgcacacacagcccagggcagcttccctcttggtcagggcccctcgctacacccaaccccttctcctccctgtccctcctctgcactctctacccttcatgctccagccggcccgacacaagcttcatctggttcctgaaccctctcaagtcggctcgctacttcttatggcacacgtatcgctggctgctcctcaaactgctgctgctcctgctgctgctcctcctcctcgccctgttcctctactctgtgcctggctacctggtcaagaagatcctcggggcctgagcccagcggcctcctgggtctgatacttctcacttcttcctctggaccaagggctaggcaggcgcgcgcacacacacacacatacacgcacacatccacaaacacaaatgtgcatacatatgcacacacacacaagcatatatgcacacacgtgccacacacaagtgcatacacatgcactcaagcacacacaggcacacacttaagcccaaacatgcacagcaactttcagttttcatgacagaatagactctcagaactagaaatgactattttacactttcccatattaagccagagaggtgaagtagcttgctcaaggtcacccagcaaattagggtagagccgggactcaagccaaggtttccaaattgccaatcctgtgttctttgcacaccacctctgctcccagccacgtttctcccagactctagtccaatttcattggcagaaagaagctgagctatggacagagaaaagggaagggtgtggccagggttagccaacaggtctggaaatggctctcaccagtgtgtgacctcccagtccagggctgttttctgcccttcggaatcatagttccattcagctcaaacatttcatagccaccatggcctgaacacccactgcaggtgcttagagttccccaggcactggctcactgtgccattgcaccaaccccaggaggtaggtactgcttgtaaccccattttatacatgaagaagccgaggttgatagaggtgcctaactgacctgtgaaaaccattcaaaaccaggcgctctgcacccaagccccagctctgtgtccccaccaatactgagctcagctctggggctgcacgccatgtcctctgggaggcagtagtttgaaaaggcatattcagtactttcactctgtatcttgacattttaccaaacctattgtttttataacacaaaagacagatagtgaggctggctaggtgcttctcggctggcaggctctgcggaaggtggagtgggtctgcaccctgacagtgggaaggtcggtgagggcggcttgtgccccacaggggccgctcagaccctcagcagggcccggtgggagcagccatttacgtccatcagaaaggaagaggttgcgaaacaccggtctcacgaggacatggggcagcacatagaacgagctaaccacaggagcttgctaacgatgagaactgcctgcagggccaaggctgccccatgctgcaagtagttcccatcaaggccttgggagcagattccagctccaaaggtcctgcagagaggatagagttttgtaagcagcaagtcgggtacttagaaatgggttcaaaccctgcctccagcattcactgcttttggggctggggccatgacagggcttttgggggtccagaaggacagaggatggggtgcactgggaggcagctcctgcccactggctgaccggctcctctcttccacttcccagccggcccgacacagccttcgtctggttcctcaaccctctcaagtccatcaagtacctcatctgcacccggtacaagtggctcatcatcaagattgtgctggcgctgctggggctgctcatgttgggcctcttcctctacagcctccctggctacatggtcaaaaagctccttggggcatgaaggccgccagctcccgctagccactccctggccctgccacatttccttgcagtggcttggactctttcccatctcccctgggcagcctgaggagcccagtgtccactcttcatgccttgggcccagagcctgcctcctgtttgtggggccgcctgtcctcactgccccaggctgcggcttgcccagtcctgcccctctgacccctgcctgtaggctggggagccttggatggggtgggaacctggaatgggtctatcttgccccatctggctgaggcaccacacttcttcaggcccaggctccagaggaagcctcctgaaaccttccccaggtcttccaagtacaggattgaagctttagtgaattaaccaaggaccaggggtcagtacccagagctttgaaaagaatgaacgagcaaaaggtatccccgccgtgtccccttcagatagcactggtctttgatccgcaacaggggccagaccctgtccacaagtcccagggtggctgtgctgtcactgctgggctccacttggctcctctcgcttcccatggcgttgcctgtcctgcctgtgcatttccatagcttccagagcttcctctgccccagccagtgcccccaagcccagctgaggagctgtgaggagcagcagaggggactccccatcctgggcacaccctgccctcccacccctgccccccttgcccttccagccctttcagctgcagctgggagctggcccatcaagtgctgcccctgcctgtgtctgggtttctgttggctgtttttcttgagtggtgatttttctctaaataaaagaagtcaagcactga

SEQ ID NO: 18 - DNA, 100960 bp, Canis lupus
  misc_feature 92722..92731: note = n is a, c, g, or t
  source 1..100960: mol_type = other DNA
  variation 92722..92731: note = a, c, t, g, unknown or other
gatcttacaccctggaagaaggggttggagtggaaatctcagacactttgagagaaaggccaaagaatggaagagacagtcagacttgcatcttggatgtttggagcttgataacagccagtgaaaggaaaggtaggtttgaccctgcatctgaaaatgtaaaaggttaagacagatctggggacccagaggcattcaaagccagcatctgtgacgattaagtgagatggggtgggagtggggggtaccgaccacaaagtccaggggccctgcactccactgagaaataactactgcccgacccgccttgccagattcttcgagcccaccccgggggcccacccggtctctccttttgtccttcaaccgacaaagatgactcttgagcgaatcctgggtgcggagcactggtttggggcccgaaaaccctgctcccttctcgggcgccccacgctctcgctccccccgcccaggggtctccaaacaccaacctcgcgcagcggctccctctcctcccgctttcccgcggcccaggctggggggggagaacctggagagccccaggccggccccgccagggctgctcggagcgcacgccagccccgggaagacggcggccggtgcacgggggcgcgcagggcggagttgccagcgggaggaggggtctaggggtggggggaccccgaccggcgggagcggccttacccgggcatgaggccgggaggcacgtaggcggcactgaactcgctcagcagcgtgcccgcgctgcgggaggccatggtgggtgcagcgcctccccgcccgacggtcaacagcccggggcacctggcaaccgcgcgcctggcaaccacaggggccgcgcggccgccgcgttcggggggcgggggggggtccctcctggcgcctgctcgcctgtggcccccagcggctgcgttcacgtccagggatgatgggctcctctgcttcgccgcccgcccgggatgcggtggcgccgggatgcgggatggaggtggaaactcgctggagaggccccgggagtgtgccccccccccccccccggtccgccgcaggcctcgcccaccccgcctggggcgccctggctgcggaggccgagcagaaagcagcagccccatcgccgccctgctccaggagcccaggaggccgcagggaccccaggagccagcgctcgggcaccccagtcccccaaggggattgtcttcattgctctctcacctctccctgggagctttcttctcacctcgtcctgcccggcaaactactctacaagagtggtttataagtaaggggcaaaaaacaaaccctggaaacgtctgggtgtgtgatttacacctgtccccagttctgaagtccagtccacaaggttagctggtttgcaccccaactggggatagtggagagcaacctcccgggtgaggttttcttgtaatgatgcctccctcctgtaactggtgcccctacatcccatttctccagtgaccctcatctcagccctggtctttaactggggtgtgagagagtggtggcagcctccaaaggcaacgtgttctttgccacttggagccaaacctgcctcccagctcccttgcagcagtgctagtatcagtgagagccccctgcagtttatcctcggccttcacagtttcactcaaatcctgtcggaggagaggtgttatcttcacagtttgactctgtgaatggcagctgatgaagaccatagacactaatgagcttgcaggatgcttttgccaccagaattctcaaaaggcttcctctgacagttaacagtggaagccacaggcttccaagaggtgcaggaagcaggaaaacaggcctagggaggaaaaggatctgaaggggaatgagtggttgcgggccaggcagaaggactctccaccacgccttcaaaccgcagagagatctgtgtatttctaaattctccatgcagggatccctgggtggcgcagcggtttagcgcctgcctttggcccagggcgcgatcctggagacccgggatcgaatcccacgtcaggctccctgtgcatggagcctgcttctccctctgcctgtgtctctgcctctctctctctctctctctctctctgtgactatcataaataaataaaaattaaaaaaaaaatctaaattctccatgcagaatataagcaataataagaaaaatgttgtaaaagttgtgaaagaacaaccctcagttcaggtgtactatactccaggaagagatccttcccccttgcccccgccaacgtcaagcgcccactccccccctcatcatgagttcccagctgactatgcccctgaacctggcaccttgtgttccagtgaatatcttttttttttttccagtgaatatcttctgcttgaggtccaatactgtatcacactcacctcagaattcctcgcacctggtactaggaggagttagtatatgcttgttgaataaattttgtaagaattacagaaatggatgattagggagagtggaaattaaaaagtgagatctggcttcagtttcagaagggtcaagctggttcagctaaggggtgctatgtgttggcagggtggaattactaccaatttatcagtatagaaacttgaccttcagccaagctcaatgtcttgtttagggcaagttcatgggctttctcctaaaaatgcacaggcctcgtgaaattcaccccctcataagagagaaccaccagagggcctagggaggagatgaatcttttttccttttttcaagtgccaccataccttacaaataaagatcacctatgacctcatttatggaacatgcgagttaatttagtttttttttttaaagagacattaaacttactggtttgaaaaatttttggacattcatctgtattcaataaatacaatatactaagatgctctttgcttcaatgtggttagatagaagtgagaaaggagagcaggaattgaggaaggaaaggagagaaggaaatagaaatagaaaagaaatagaaaaaggagacaacgttgcaaggaaacatccagaaggaggctcctgtgacatcctgcaggtcactggactatagaattcgaaggaagtaacctcttgttagcatgctgtgaaattttaatatttccctttttaaaactttaactctgttccagataggtcaccaagctcaccccttatcttgtcaaccttcactgggtatcctactatatacacaggattccatgtgaggctctagggagcaaaaatgcaggaaaccagggtctccccatcataagaatgaagcaatgagatgagaggggtaaaggcagctgggtgaaggtgtgtgggtgcagaggtactttcaggattagacaccagttgggctgagtccaggcaagaaggctttggtggggtaagagcattccgtgcagggctaacagcaagagcaagggtgcagagggcctacagaggctccaggttcaggaatcttggtccctttccctataatccccagggtccctttctccataagctcctcccagggtatgttgctggaagacagggcagttcttttttggtcctgggaaattttgccagatatcccttccccacaccccctaacctcagcagctgattgcacacgaggactgacagtcctgctccagtgaggctcactggcccaggcttctccatccctaggccccaggatggggcgatggggtgaggttggtgtcctagaccttaagcattgcccttagtagaacataagcctctgaggtcttcaaggctgggcatctcccatcatgcttaggctggatcttgagctcccctcaagtagcaccccatcttcccagacccaaggatcccaaagcaggaggtcaggatcccacctttcggaggttcaatgtccacactagcagatggggaaaggacatctcctctttctcttagggcttccatttctgacagcagccgccaggcacagccttcatgttgtctggcagatgtttatttttcagcttagggggacccctgggttgcaatctctgtgttccacagtgggtcccagccaggcctggcccatccacgttccccagtggcaaccctgactggggaggggggcgcgaatcacctcgaaacaccagtgcgacagcccagctccctgcgcgcacagatggtgaagctcccggtccctcccccagagcgggaggtgggtgtcctggccccacgcccacaccttgggcacttgtgcctgtgccccctgcccacccctggtggcggaactggccgagcgggcgcaagggagcgctgcagagaggtgggccggagcgcctgctcccggggctggagaacgcatccggaggctgggcagggcttcctctgggagcaggcggctgctgaataatgaattccgactgggagcccgcactcccgggctgcaggcggggcgcccagcacgcgcgcacacaccccagatacacgcggggctgacgcctggggccgccgctggccggccctgaggctctggaaccgctgcaaggagggctcgcgggctccgggtgccgggtctgtgggccgcttggagggggcgccggaggaggcggcggcgcggagaggggaggcgggagagcgggagcccagccccgccgcgctccccccttcccggccgctcccgcccggcctgtccgggctccccacaccggcatggctctgcttgtccacctcaagacggtctcggagctgcggggcaggggcgacaggatcgccaaagtgactttccgaggtagggaaccccctgtcgtagggggaccccagctctgggctggcggggataaggcagggcagggaggatggatgggaaaagttctggcagggtgggggccacgcggcttttcgtgagcagccatctgcccctggcctgacaggtggttgtgagttcctgaaaatcggggtcccccgtgttgctgtgtctgcgtctgtgtctgtccctccctgcacttgccaatgcgccatgtgcctagtggcgtgcagagtcctctgcctgcaggggggcctggggaggtagaagtaaggaccccacctctgaggtcgggggtcccagggctaagaggcctccactccctctccctccagatttccttggacacagggtgggggtgggctctgcagactggaagccccagtatggctcctagaaaccaggcagccagtagctctctggttgaggatactattggcttcttgcagatctgttggtgggcagggaccctttgggctccactggcctcccctctgtcaactctcttcctatcgtcctccccactcatgcatccagcagccacatactatgatctctgaccaaggctgggggctgagcatgacccaggctctgtctttgaggagcccacatccagggggacagaaggaccagtggggaggcatgcaggacaggtgcatgatatgatgaggatggggacgaggcagcacacgagccacagaagcagcacctgacccaggctggggcaggatggtcaaggaaggcttcctggaggaggtagcacctcagctgaaacccaagggactagcaggagagagcaaggtgaggaggtgagggcagagctggtgcaagggacaggatgctcaaggctgggagaggagttgggacatggaacaaggaatagacagatgatccatgaggctggagtccagagtgagtacgaaggcgaggcaggagagacaggcataccagggaagaaaggctgccttcatcctgaggacggtgggcaggccctgagggttttaagcagaaaaaagtaaggccaggtttacctgtgctgattgcccacccagctctgcctctgctggccacacagcccagctctctgagccaggggcatctctggtggcctttaagcaaagtccaggcactcctcactagacatggccttcccagagacaggatgaggatggggggatggggaggagctgagaggaccccgccagattaaagagcgaagtgaacattgggcccaggctgcatgcacatccacacctgggttcggagggagaggggagaccagggacagcagccctggtgcccacatcgcccctcagctggactggctctggctggaggctcaggttgtccatactgtggcctgttgtgcatagaattggcaggggtgcgggggatcgcagtgtccctgctggcaggtgggggaggaaagggtgggcaggctgcctgttgcttcccacactagcccaaggatggctttgtctgcagcaccctggatctctgtgtgccacctgctggctttagaaaaagcaagtatgtcctttcatctgtgaaacgtgtccccaaattccagatagcacagtacttggccgtttagctagattactatgataggacagttcccggctgcacaaaaccagtcacatttgcaggcagagaaaccaaggccccgttgtaaagagatccacaaagcagtagtggcggggctgaggcacaaaacctcccctctcccccagccctggctgctcaatcctgcaagccctttatctcttcctggtcagctgggagtgagcaccctatctgatgcccacctttttctttgagcactggggccagccctccagcctcaactgaacacacaagaatttgcctctttgcaacctgagccccctagactgagtggagagatccacttccaaagctctatacctgcagctggtggccccagacagagctctggggaaggagttggaccttaggaataggcctattgcaagcagatttccagaaagagtcctttgtaacaaccagagatgcctcaaccattcatctgctgagccagcagttgacaaccagagatactccaaaagaccaacattaacaacaattcagaggaacccacccattccagaatgttccacagcagttcctcacatccacaaccactgttgaccaagaaaacagctgcagggggggaaatgggaaactggtgaagagtgagagggaggtgctggccgagagttcccctaatccctcgagtaaagttcatgacagtttgggtgagggagccctagtgagttgtgcctattggcagtggcccatgcagaccagactagctggttgaaataagcttgaccttatgtgctgtgccatccaggacacttagagaagagccctataggtctgtggtggaaaagctctagataaggagtcagaaaccctgggtcctacctgggtcccgccactcacttcacctggatagtcctcatctttaaaatgggcatgtggataacatccacttcaacgggttacttcagtgaaataataggcattggagtttgaggaaagagcattcagatgactgatgtatctgggaggcacccattccacttctccctggggaagctgctggctcctgaaccatcttctctctagccagacttcctaaggggagaggagagcatgtctgggggcttcctgacctgtgtcaagagcaagcaatttgagcctgtcctctgctctggagggaccccctggctaagatgttcctcaggacccaagcctgaagcagaccatccctgagacccctgtccccattggggttagacacctaccagctgtgtccctggtcacccctctcttcctgccatggggtcagctggccgccccaccctcaggcttgcaccatgctcaccacccagctccatctccagctcttagctcttactaactagcacccttaacctcatcctaccctaattcattcactccctgaatgtgctgatatttgtggacaggcctaggaccctaggggtgaagacacagcccggcctgcaggagttatagtccattgagtcagacgggagacaccggaaggcctggccccccaagtcctagtcatgcacacagaccccagagtcccagagcctcggcttcccacgggcaagatgagactgtggtccccatttaactgagactcctacagtcagaaactggagtgggctgtctggaaaggagccatctcaatgacaggtcactactcaaagagaagcagtattcccctagcacttgtccttcttcaacctgctaaaatagttctcagcatcatgagaaccagggtgggagagcctgtaagttcctctagcccaacctctatctggtactcagcccactggaacctggggagaacctggacggtcagggaagtagccacaggctgtctggggccagccccgtgatcttcccatactccccaaccctgagctttcctgccaagataccgggctgcaggattgggatgtgagaggtgggcgatgtctggaggatgggtctgatctctgagtaactcacctggcctggtgattgaaccggagataaagacctgctttttcaaggcttctcccttggcctagagacttctccttcctcctttccccagcccactccatggcattcccataacactgaatttccagccattccccagatacaagccctatatatctccagaccctaaggcatttatttcttttgcctggaacaatccccaccctctaacttgagaactaccatcaattctgtgcatgtttcaaggcccagctcctcatgtcacctcctctgtgaagccttccccctcccttgcagtaccatgtgcacactcctgccacagctcagctcggcacttggtattttagaaactgccccagttctgtatgttgcactcatgtctgagcaccttcaaaacaggggtcccactttagctctcctcaccgagcctcatgctgagtcccaggccctgtcatcaaaatgaatatgacacaggtattgaggtatttactcattagtgggttttaaatcttccactgtggcactgccattcttgggctcagcgtccccaaatgtgagcctcctaaccccaccccagttctttatctgaggggatctgggactggaagaggcctcagaaatgacgacaagaaccctccatcgacctcctggcccagagggtcttctggggccccagagggaggctgacctcaccttttagcaaacgctagggagtccagctccagcccacaggtcagaagtaagaggggccatatgtggcccaagcccttcatggaacatgctctttctgagcacagctgctgtgtacaacacatgatacagagtgtggtttaataggcaaaccagggtctcataatgagataggggagcagagatgtgtgcagacataacgcggaaatgtcatccaactcaggagggcccaggtgtacctacgggtgaggcataaactgtttaggtttaagcctgtttaggggatggcagcttacttcttgcacatgtggagatgctgggggggggggggttgttttgggaagtgaagcaattggcaagggggcgggggacccgaagccaaaagaaagaagccacaggtttgggtggaacaaaagctgctggggagtgggcagggaaagaaatgaaccaggatccatggggccaggggaaaaactgtatgctgggaggggatgaagcccccacctgggcacaggggacaaaatgctcccactcgtggctgtggggaccactcaaattccaaattaaatttcttttccccattaaaatggaggaactctccctcttgataaataagacttctatctggaaacttctctgccatctctggtgaaagaggcagaataccccaatgcccccagtcttgcgatgctcccaggatgcctgggcctgtacgtgcactctggcccagcccacacctcctctcggaggggacatgggttaggtgttgctccctgcgagggggtgggcattgcccccacggaaggggacaaatggaggggacccgtaggccagcctctgcaatgcacactggctgtggactcagctctgtgctttccctgtgcctcccacatcctcccctgtacccagcactcacaggtccctccccagctgggggcgggggtgggcacagatcttctctaaaatcccaggtggcaaatgtacccctctcccgcccagaacaacccaacacaggccttggggaacatgcagagcacgctgaaagttccccaggcctctcctgctttgatgagtgtgttttcatgttatggaaatgaccataaaattatcttctgctacaaaggccctcagcaaaaatgctgctggaaatgtgctcaagcatagacttgcaaatgatttccctaaattgcaatgccttccttggttatcttacccacctttactcataacagaaaagctacagccctcccacctacgcccatggctgggtctgatctcttttttgttattaactttttataatggaaagtctcaaatacatacaagggttgggaaaataagttgtgccttggctaccaagctttcctcatgcattcttaacaacaatcaactcctggccagtcctgtcccatttgctcctctcctactcccatacaccaaattatttggaaacaaagcccaaaaagccataccatttcatctgaaaatattcagtacatagctataaaagacaaagactccatttttttgaacccacatattacatcactcctaaaaaaataattccttaatattatcaaatattcagtcaatgatcaaatttctaattgtctcatcgtcttaagttttttccagttcattaaaagcttcattttcatgtgcttcgtaaattaagtattttgtcattcattcactgattcttttttttttttaagattttatttatttatgatagacatagagagagagagagaggcagcgacacaggcaaagggagaggcaggttccatgctgggatcccgacgtgggactcaatcccggggctccaggattgcgccctgggccaaaggcaggcgctaaaccactgagccacccagggatcccatcattcactcattctttcattcatccagataataatattcagtgagggctagctatgtgccacgtgtgattttaggcattggggtaacaaacaataaattaaaaagacatggtccctgccctcaaggggaagacagtcattgcacaagtcatcatgagcagcatgatgagtattttgaaaagggaggtgcagatgcaaggcagcatgaggccaaggaagcccactcagccggggaggaggggggtctggaagctgccctgagagggcgagcaggattcattaagaaaagatggcagaagagcaaatggaaagggagatgggagcaaaccagcggtactggtgcctcccaaagtcagctgccttggagccaacaagatgaagctggaatgtacacagggcccagggaagagattttattgagggggtacagaggatgggctgatacttaagctggaacaaaacctacaaaaggccccattccaggcagaagggttaatatcagtacagatgtgatggtgtggagtcacatcaagggtttagggaactgggagtgcttactgggagaagggtgggaatggcatggaggggaggttgggaccaaacacagaggctttgaacttcattttgttactgaataggagtcaatgatgcttttagaaggagaataggacagggtcacctggttttggaaaggacattctagatatcaggaccccaggccagaagcccagggaggaagctggggcagtggtacaggtagagaaggctgtgccttaatggagaggctgtgggttaggagagaaggaatgacattggttcagggaggagttagtgagctctggagtgggtagggagcaagagggcaggatttcttacttgggtaccaggaatggtggtgaggccactgacagagaaggggagcatgcaaggacaggcttgcctgtcagtcattctagtgaaaatgttctacaggatgccagagatctggcttggtacagtgagtgcccaggaaggtgctggcacccagtgatttgagaatccagggggtaagagaaggtctaggagagggtgagatatgtctgagtcctcatagggctggtttagggtcaagtgaaaagggtgattacatgaaaggctttgcaaactgtaaagtactatgtaaatataaggattatgctctttatcccagggctgatcccgctgcagacttccagagagacaggagtagagcaggttatgactctcagggactccacgattcagggatttggggagtgggcagagacttacttgacattccttgggattcctgttgacatctcaaatacagccatgagatgacggggtgaaaacaccgaagtcacaaagatgggctcccccaggacaagcagcagggccaacacggtgtctggcacagagcagccctggagtagaggcgatcactgaaggagcggggcccacaggtatagcgggaacagttgcagttagtagcaggggccatcctggcagcatcaggcagcagttgctccttgcattgatggttccagaagtatctcctcggacagaaaatatcatgtgatcatttttaccttcaccccttgtgtacttcctgcctggactgatccaccctcaagatagtggctcaacagtcttttctttctactttattttttttctcaaagcagaagggctcattggcttagttgaaagttagtttccgctcactggcttttttccccctcaagccaagacttaagatacaatcgggatgatagtttgtttttttttaagattttatttattcattaatgagagaggggggaggggcagagacgcaggcgaggaagaagcagggtccatgcagggagcccgacgtgggactcgatcctggatctccagaatcaggctctgggctgaaggtggtgctaaaccgctgagccacccgggctgcccccgggatgatagtgttaacaatatttttaccccatttaagaatgtaaaaagtcactttcccaccatgccttattatacgtccagtggctggcatagagcaggtattttgtggatcaccagaaccacaagttcctctaatctggcacagtaatgggggagcctaagacctgccagtagctgagtgtggctggcactgtcctaggcttgagaggaaataccaaactctctctgcttcaatgcctggtctgaaaaataggaacaggggccatcagttagttccatggcaaagtaagagtttgagtgagcacctagaagaaagtggaggtgtaagctgaggcaagagatgtggtttataatccctgccttgtcccctgcctctctggcataagtctgagtttctactgtgtatacctgggtgttcacaggataggcaaaggagagataaatgaatgaaggtcgaaattatatttgaatgatatttgtggaaaatagaaggtttgaagtagatggagcaataggggaaagagaaaggtcagccttcccctctgagtggcccagggactctgcataacccaaatctagctctctgagtcgctggtgattttcagagagcacattatttaaggaacatctttgggagaaagtgttattacaggagataattacaaacaactagacacaagaatcattaggaatatagaacatttgacaacaccatcaaccgccttgacttaattgacatttctaggacatttcaccccaaactgaaagataaacattcttctcaaatgcacatggaatattcatcaaggtagaccatacactgggtgattaaagaagtctcaatatacttcaaatgactgacatcctgcaaaggatgttctctgactgctctagaattctctttgaaagtaataacattaagagatctttaaaagctccaaatatttggaaattaaacaatacttcttaaataacctatggtcgaagaattaaacaaaagataatttataaaacattcctgctgaatgataatgaaaatacatgtcagcatgtatagttttaaatgtctaccgcagaaaagaaaaaaagtctaaaatcagtgatctaggtttctgtcttaagaagctactaaaagaagattaattaagcctaaatcttaaaagcatcatgctaattgaaataagccagacataaaaaggccacgtatcatatggatccatttacatgacatgcctcaaatagacaaaccatagagatagaaagtagactagttgttgcctgggactgaggcaatggggaatgaccgctagtgagtgtgggcttccttttgggatgatacaatattctggaattagatagtggtaaaggttgaacaactttttaaatgtaccaaaatcactgaattgaagactttaagtgagtaaattatatggtttgcaaattacatttcaataaagaaaatgtaagtaaatacaaccaaaaaatattagaaccaagagaataaaaaaggaaatgagaaagccaacaaaactgaaaggtgattctttgaaaaaaattaataatataggtaaactgtagcaagaatgaccaagaaaaaaagcaagaaaatgcaaattaccaatatcagaatgaaaaaggagatatcatttcatcaaaaagaaaataaaataccatgaaactgtatctcagtaaggttccacaactcagatgaaatggacaagtcccttgaaaaacactttactaaactgacacaaaaagaaattgaaaatgataagagtccaagatctaataaagaaatgaaattagatataaaaatgatgttgataatgataatgatgaaactcttttcatcaataaaactttagacctctattgcttcacgggtgaattctagaaaatgtttaagaaagaaataatactaattttacacaaactttcagaaaatagaaaagaaggaacactccataactcgttttacaataccaaaccctgataaagatcttatacaaaaagaatactagagcctaatatccctcatgaaaaaagacgtaaaaatcctcaataaaatattagtcaattgagttgcaatccatgacagggataacgcaccataacaagtgaattttatcccaggaatgcaaggttagtttaaaattagaaaactaatcaaagaatttcaccatattaacacaatataagagaaaaaaacctctgacaggtaagaaatgcttttgacaaaatccaatacctattcctgagaagaatgctcagccaacagggaagagaggggatcttcctcaatctgataaagggcaagtacaaaaaacatctggctaatatcatacttaatcttgaaacaaaaaatatttatacacagaatattactcaacaataaaaataaatgaattacagttatattcaacatggataatataatataaatattatattgaacaaaagaagccagaaacaaagaagtacattctatataacaccacttatataaagtttaaaacaggcaaaactaacctttggtaatagaaatcagcagtgattacttatagggggtagaggctgaatggaaagaggggggcaagagaccatcttgagaaaacggagatgttctaaatcccgattatatgatgattacataggtatattcagttattgaaacacatttagttatgtgcttaagatctgtgaatgtaaattttaccttgttaaaaataaagagctgataacacctaaaatacctaaaacttgaagaatatgtagatgaggaagaaaatagtttctgattatatactactaaaaataagctaacaaaatgggattcacagtagagaagatcatttttatatttaagatgtaacttaaatgtcaaaagcaaaaacagtactctttaatggaataatggccattttttttattgggtgatgaactatgtcccaggtgtacaagcactaccatttgcttcattttatggatgaggaaactaacaaagagaggttaacttctctaaggacacatggctagcaaggggttgagctggggtttgaactcagtctggtccaagagcctatcactctcctgtgacctcctgtgcctgtaagggacttgacacttcactcagtgtcagtttccagttccaggatataggtttgtccaggacaattgcctccagtttacagatgatggctctgagactctctggggtagcatagctagctccaggcatgagtacagggcgtgatgttcctgaggcttgttgtcaggacattctccttcacctttagatggctctccacccccaccttgtgttctctcaggaacccaggactccaggacccccctcccagatcttccttcagtggactgctccctaagggctgacctttttcattttccccttgaccatcagaattctcctgtcctgtatcctgctctttcaaggctccattctctgttcacacaaacatttgctcacactgtgagcctctaatggatgtccttctctctcccatctccccagggtcaatgcccctgcctctaccatgtcttccttgatctgctaagatgaggtcatttctccttttcttaagtgctcacgttatcacactttgttgcatgccaatgatccaattttgcctttgtgtaggagcttttacatgtctgacctatctatccatctcccttctggattgtaataagcttcttccatcagtgtcccaatacaaaatatttttctataacccccatcccctcctccagagccaaatggccacgctgacacagcaggagcagaagacccccttgcatgtgggagggaacgcatgcacaccagctaacaacccaggccctacatacctgccttttctcaaggtctggttctaacaaggtcaactgtctggaagagggagctgtttggtgcagacatcacatgttgtacccttaagtcatgtcacatgaaaggctagtgctccatcctgcaaacgagacaagaattgagctggccttcttctagaagggtaactataggagggatatggtaaatggtaaatgacataccagatacttctaggtagctttggactcttgagtccctccatctggtgtgtccaatgtcatggcacttcttacgcttatgagctgggtcgactctccaaacttcatttattgactcaaggaatttattccaaacctaacagctctgctgtcccaccagcagctgcctctgaaggaagggggtgccattcacttttcctcatctgatctcctgctcactctgtccacaaagcctccccgatgcaaggaatgggctatttttctttctttcggacctcattctcaatcttctccgcagcaagaaaggtgattggatactgggattttaaatggttttgtctgaaagccattaataatggaactgaaatgtcaacacgactggtgttaagtggagaagatggcaagtggaaatgaacttgaaaggaaagacaggggtaggaatacccattgataacttggaagggattacagaagtcccctggctctgtcctaatgaatacaaaggaccaccagaatgatccctgccactgtttgcacaaactcacctaaaaaccagcttttcaaaaatgcttaaggacattctgtttctgtacaactgatttgatttggtttagcaaattttttttttcctaagcatctagaggtaaaattgagctcatcctgtttgacaatattcaccacatttaaatccccagagcctgaggcaatgaggttttactgcatttcggaacagagccctggtgtataaattctgcagtggctaatttcactgtattctatgttctctgtaacaaggctgtaagaaataaataagcagagatgggtttgaggctctgaggcttcgtgcgctatgctggagtccctccctgcctccgcccaggctgccctgcttggttttcactccaggaaacccttgaacacagcatatccaggctcattgcgatctttgaggattaagaggtctttgattattcagagcggcaggtccttggggaagacccagcgcacacataagctcacctggtccccagtttatattgtgtgttacctgtggggaaaatcagaagaaactcgggcactatctctcatgcttccctatcctcccctggctgccctggagttggttggtgagatttttctatcatgcttttttgttttgttttgtccctggctagtgctaaagggtctttgtttcccatctgtctccttcacatctgttttatgtgtatatatcttctgcttcatagcttcttcctcattatctgagatgcaaccccttcccaacacgcccatcctccacacacacatacatacacgcacacggatctctacttacctctgacttcgaacccctggcctcctccttgtcagggggtagctacatgcttgctcctgagttctagagacaggcaggccctggagatctctgtaccagccctcttattatgctaacgagagaaccaaggccagggggtggaagtggctccaagagcatagagccccatggcagtgcagggtcagagggggctcactccagccttccctggcctggcactggctggccatgctggggcagtgtgcactcccctcccttgccctctctgccaaagtcctctcctgggtccctatcttgtccatcagtgacaaaccaaactaagcctcagaatggagctaaactccgccttgagatggtccttcaatgacatggaccattgctttaagtcagtggggatttcaaagcatttttctctcaatgacagaagtacagcatggtcacggaaaaaacttcaaacttcagcatatacagtagaaggtcaaagtatcctgctttcaatctcttcttactctccctagccagaagtaaccatttctaatggcttgagatcattgtctattcacagatacaagaatttggtttgggtgttgggggcggggggagttgtatacaggatcctgttatccatgcagcttttttttcccctttggtatacaactgacagatgccaatgaattaatcctaaataataatttcttcttaatgccacctacctctggggttctcctcataggaattacaagtccttcccacatgcttccaccccccacacaccaaaaagacaaaacatcccctttgaaacaatatttatctttctttctctgtaccacttctctgtctcacataacactgtatcttgggatatggattatatagtattgatccgacaacctgttccagatcctactagaccatcagctccttgtgggcaaggatactgtgcactttatccatacctttatcctgagtctccaggaggtagcctggtaccttgtagactccagtgaatgtttccctaagtaaattaaactggcctgggtgtcccacacactgcccaccccatgtccacaccccccccccaacctggttcttccagcaacctggttcccccaggatgggatggaagagcagacagcttggcttctgccctggtaggtggtgtatggatgtgggatggtgggggctgggaaaacctgtccgtatcacattcaatagtacccacgccagtgttaaaaggagggggtggcttgtgggagaagccacttcaggctttcctctcaaaggttgccagaaaaatgaataagagagtaggagtagtaaagtcccttggcttccaggggaggagcgtctggggtttgcctggttgtcccagggcctggcttgggcaggagctcctgggcctggctgcagacacaggcacaaagggggtgctgccgcctggcagggcgcccgctgccctcggaccaggcttctgctccaggcagctgcaggccagggaaagccagcagagccgaagagacagcaaacgaggccaggaaagccaccgggagagcagcaaggtggataaaagagtccagggctcccctctcacgcctatacctctgaccagcctgtccctttttatgtcaatgtcccatttgtaaagtggagctagcggcctttgacctgcatgtgttgcagggctcccaagggggtcagatgagacaatatgggaacttgcctcatcttgggggagcactgcacacgacatggggcccccagttgataacaagtgctatgtggatccaaatgctgtggtggcgagtgccaggtggaggtctgaccccaggcttcttgtcctttttccccacccagggcaagccttctactcccgagtgctggagaactgcgaggatgtggcggacttcgacgaggtaggatgccctgcggggagctcaagccccagccataggggtgcgctggccccaaatgcctccccacctctccctttgcccaggagagctgggtgcagagtgacccaggcccagcccacagcctgctgccctcgggggggatttttgttctccagagaaagggcccgcaggtgttataggcttaaaagtgagcccccgggtgcgcctgggtgactcagtcggttaagtttctgccttaagttcaggtcatgatcccagggcttatgggatcaaaccccacatcacgctccctgctcagcacggcgtttgcttcttcctcttctgctcccactcctgctccccctgcttgtgtgcaaaattaattaattaatcaattattatcttttaaaaagataaaataaaatagtagcaagcccccagccgaggtgagggcccagcagcacagaagaggggcttccctccccacttccctgggcacacggagggctcaggctaaccctacctgggcttccgacaaagccagtctcgtatggatggcactcttgtgtctctaagagctattgaggtacttttcccactgcatctcccaaaaaagctatttttcttttgaaccttgggctcagagggttgagtgcccctgtttatggcacattatctcattgttcctactaccctgctcttgttctgatgcatgttttgtgtgtcatgtatgtgtcattctcctttatccacattccttcctttctctacaaccactctgatgtgtttaatgtggaacctctggtttcctgtatgtcctcacaaaatttgtgtggctatcttgtgaagatataactcatgttttagttaaatggcattgtgttacatattttacttcaccgagcaagatttttcagttccatccacgttgctacgctaatctgctgcttctccctgccatacagaactctgtgggcacatccaacacacatgagggtgtttggccaccctggtttgtctgggaccaagggggatcctggcacacagactgtaagggataaaatgggaaaaatcctggtcaaattgggataaattggtcatcctgcggatcctttacctaataattcctccagagaggaacctccaacttgcctctgaaaccacatgcaaggtaatcagaaggcaatgaatattcttatgcatgtcctctttggacttctgtgaacatttctctagagtacacaccaggatctgaaattgctagctcacaggatatgcttactcagcacggccatggtctacacttctaccagcaatgcgtgaggacccctgattcccaatcctcatctacatctagtggtattcagctctctgatcttcaccagtctaacagtgtgcctcgttttttaagataatatatttaaagtttcctttttcgtaaattgcctgttcatattcttttcccttttcccctgttggtatagctagttgtctttatcttattgatttgcagtagctctttattcatccaagatatcaaccccttgttggatttcgagattgaaatttctcttagtccgccatctattagctttgtcccctcactgattagaagtccttaatcccggtgtgttttcaagttttgctgaagatatatttacactcttctagagtacagatatgttgccctacattttctgattatataattgtattttttttaccttgcatgtggttttagagggggcacagttttatttttctccatataagaaacaacttttcctaacatcaatttgataagcaatcaatcatctctctatttaggatctatgtcttagccttctattctatccctttaatctgtttgttcttgaactttatcacactgtactcattaatatgacatttttgtatgtattagtatctgatgaagcaagttccctctgtttactcttctttttaaagggtgaactgtttgtggacctttattcttccagataatttttaaataagtttatcaaatccttccaaaaaccaaccggaattttgattaagttccattggatttaaaaatcaattgaggaagatgtcaattttttataatattaaatcatctactcaaactatccacctccctttactggcatttttaagtttactgcatagaagtcgtatgatcttcattattttctcttattatttttaaaagatttatttatttatttgagagagagaaaaagagagagagagcacccaaacagcttgggggacagagagaggatatgcaaacagactcccactgagcaaggagtccattgcagtgctcgatctcacaacccatgaaatcagaacctgagccaaaaccgagtcagatgcttaaccaactgagctactcaggcaccccaatcttgattatttccgagactctttctggttttattgttatcatgaatggtgtcttgattttgctacattttttgactattgctgacttagagaaatgcttttttttcctttagaagtcctcttttatctggcaaacttgctgaggtctctgacttgtttttatatttatggtttgttctgttttgtatataggtgatcatgtcatctacaaaaagaggttttatctcttcccttcagtcctatccccttatttctttgtttttccatggagcattgaccatgattcctagttctatgttacacagtaacggtgattggtaggcatcctttctatgtccccagtattaaaaagaataagtgcatctaaaattttgtcatcatatatacttgctctaataggatcttactatttgtctaactagtttgctaagagttttcattataaaacattgttgaactttattacaagtttcttctgcatctattgagacaatcataactttgctcttctagtatgttccataaagtatttcatttaataaactgttagattcaactagcaaatatttttatgcagcatttttgcagctacatttgtaaagttttcatcatttgataatgcataaaattttctggaacaccatgcataaaatagagatttgctcttccttgacattttggaagaaccacatgcaatggcatctaagtttggatggtttagggaaggggttcttcaacccccttttcaatttctttgtgtcttcttgcaccagttttggatttctatatttttctagacatttaaacatttcatctaggttttcaaatttattagcacctatttgattgtaaagtttttaaattgttttaaagtattttttgtgcctatactgatttccccttttgtattccacactgcacttatttttatcatccttctgtttttcttggtcttgctaatgatctgtttatcttattaatctttgtaaagaactagcttttggcttcgttaatctcttctgttgttcactatttcattatttctgcttttttcttaattatttcccttctccctgttttatttatttatttatttatttatttatttatttatttatttatttatttattttgctctgtggctcttttcctaacttcctgaattgaatgctaagcctgttatttttaacttttttatttcttgataaatgtatttaaagatataaattttgctcgatattagccacatcctacaaaattttatatgtagtattttcattatcttcagctttaaacattttttgtatttctttatgattttcttttaacatatgacatgttagagtctcattttgttcgtttctagttttcttgcattatgatcaaagagcacagtctgtatgatagtgatacttcagaatttattgggaccttgattagggcctctatgcatggtcataaatactccccctgcctaaaaggaatgtgttcagtgaagggttctctatagaaaacaatataacttcaagcttttataatataagttcaggcttcttagttgtactattcaattcttaaccttttttaagattttatttattaattcatgagagagagagagaaaggcagagacacaattcttcaccttttctgctcatttttctcttcttgatttcagtttcaaaaatgattgcaataaaatctacttctacaattgctgatttacatatttttccctgtagctgtcatttgttgcttgatgtgttttgaaactatattactaataagttttatatgttcatgatggctatatcttcttatctacttttctttttcctggtacttaatatccttctctgtctgatatgatgtttttttgcattgctttctattttgctagatgttgagattatgatctcagctaattttggttcatttgcctggtctatctctttcagttttttaattttcttggtatatcttttttcatgcctccattttcagtatttctgtgctattaaattcaagtgtgtctttttagggcatatatttgtagattaaattttctttcccactaggagactgcgttttgattagtttcatccatttacatctattctaattgctattttgatttttatttctaccaccatcttattttatattttccatttgctgtcctttttgtttgtttgttttcttttcccctttccagctttccatggaatagatcgggtttccttttgttaagtgaaaagttatacattctatgttttcaaggtagtcacccttccttggtccctgttgatagctggaaaataaatcagtaattataattcccccatcgtggcaagtattataatactctctctcctaagcctctttgatttccctacctcagcccacactgtctagattatacaattttcattccaggttcttatgaatgtgtgttctccttttctttttatttgccctagccttctttatcttttttgaggacaacaaaagtcttcaccaagatatctaatcaccttttcttctcctatctcctgaagcatctcttggcactgtttttctttttatttgagtactttctctaaaagccatttcaatttgggtctttgcatagccaaccctctaaatctttgtaaatctgagaatagtttcttatttcttcaaatttgaacaggactttctagatataaaattcgaagctcaaaattctttcctttacttcagaatagcagtgcctgttgctgttgagaagtctgaaggccatctgtttcttgtaccttcaagtgggatcttttctttttccctgggggagaaaaaaagtgtaattcttttatcttgatattctcaaattttattataatgtatctgactgtggggttccttattgctcccgttttgcactactttgtgagctcttttcaaagccaaggcttttcatctttcatttattatagcaaattctacctccattttttcccaaaggttccttccattcagtttttatattgttcacttctctccgactcctgttatcagatgccgctacttgcacctctaactgccatttctttgcttttatatttttataaaagggcctatcagtcctttcctgcttttttctgagttcttcaaaatgatcttccgattgactaatttgttctttctttcttagtatcccttgtttttgttttatattgctaatatacgtctttatggtccatttgttctaatgatcctgcccttgtggtatatactgctcaggatgttgtcttgcctgtagaagaaatgtctctccaagtgtttgtttacccagttcaagtgcccctgggatcagctaccctgtctgctgaccagtctggggaagcatcaaaaccagctgtgtcaggccctaggggttgaaagcaccagggggaccccagtcaccacagaaacaggcaaagtctcctatctaaccctttaaggagaaacatggtggccagcaagcaggctagatttttaacaaactagttttgaggtttcactgagaggaggtccatgaacacctatcttggctgctccccagcctccgccagggagcctccaacctccccaacacagatcagctcaaagaggctttggtctcttgtttctcacagttgtttgtctgtttgtgtgttacttactagaatctgtatttccctcttgcttctagagtttctccagggttgactttggggtaagaaccagcagtcctaagttaccatcgtggcatgaaacagaagctctgctgtgacccccagaatagcttactccttccttcttgggctttgcttctcacctttggctcagctggctggaagggcctcatggaagactatttgtgccctttgaagctggtatttagctgagcagctaccaggctgaggggccacccagaacctctgtctcctcctcatgttgggcccatcccacacagtgttgctgtgtctatatgcccacagctgcaggcacagggaagcaaggccttggccttctctcctgcactcaaaagtaaccactgaccatcatcactgccagcaggctgtgccctccacaaggacagttctgttctagacatcttccacccctggctgtgtcactttcagtttgtttctaagcctctgttacccatgtgtcaagtgaacccaatgataggtatgatgaacaaaatgagggatgatggggatgatggaaccatggctccctactatgccagcatcttggccttgggcttaccccactacgcaacctatgcttccctcccttcccctttacatcagtcggtgcccgagaggaggggttggttgagtgaagacactggatcactccctcacagtcctgctttcctgggcctctgcctctgatcatccaggcagagcatctgactctctccttctcatcaagtctcccaggggacttgtccacccaggcctcagccaatgagcaacctgatgccccttccaagggcgctgccacacctttccattaactgcaccccgggacacctgagccacaggtatacatgacattcaaagttaatcaccgtgtccttcctcttcccaatgctgcccaacatggggcgagtggagaggcagtccctgccggccccaagaacaagcatggggccacattctgagtgcctcttgtctgccaggctaggataccccagagggggaagcaggctcaacagcgcatgaggatccatgtaggaacttgggcatggaggagcctctggttccatggttgggggggcggggctcagaagccagggagtagtaagcaaaagcacatggccaaagttggagagttgccccaagatggggagaagtggtcctcacctgggaaaagttctactgattcgtgagctgcctgggaagtttctggtggttgcagtggggaaccgactggcacttcctggaatgggggccaaggatgctaaatgacttgcaaagctcaggccctcccacactgtggggacttgcccctcacttccccgggggagccccatctgacaatcatggtggcagctttgagcagcagcattgcttcctgagcaatcctcttccatccaatctccacggcaacctacagatgatgaagctctggctcagagagcatgtatccttcccaagggccgtaagtagcaaagccagcattctaagtccatgcttcaattaggttataaacccattccagaggcagcagtaggaagctgctcctgggcctgacccccaccaccgttcaaggccgtgttggtcttccatgtgccctgccaccactcctccctctgaggagtagccagcagtctagcaacgactgaccagcagtgcacccccacaaagcaggggaggcagccctccaccccctgctcaaggagggcccaggggcctgggtctgctcagccctcaaagagggtctgaaactgcacctgtgcttacacctgcctccccagactggagtagacaaatcctaaatttcctcgctggtccctgaaagagacaatctacctgtggttccagaagaagcttggaaaaagcatatcattggcccctggcaaaatttctgaaggcccttttgcttttcagaaagtctcttttctcatgtttactgtgcccagggccctcaggaaccaactcaatgagatacaaagagcactggcctgagagtcctgagaactggtctacggtcctccctgagacattaacaaactccatgaccttgggctggccactcaacctctggacttcagattccccttttgtaaaatggggataaactccttgctctgcctgcctttcaggacagttgcgtggctgaaaaatgaaatagcagacaagatagcaaatgtctctcccttctctgctcagacaagggtgagagggaccgctgcaggctggcctgaggaacctgagtagggaggaggtggccttggaagaaagacaatgcttcagacaacaatgggtggaaacagaacctggatgtggtgtctcctttccctgagattggaacctgagcccctgcatttaacctacagctctagaggaggagggaggggggagggagggagagagagagagagagagagagagagagagagagaatggcattgtaccaggccagcagctagcagaggcccctaccctgggggaaggagagtagtccccacactgagcccaccctaagccagtttgatttggctccaagccaggagcaatgtggacaggactccagaggtgaggccacaagagcaacagtacttgtaggaataataagaagagcagctgctacgtagtgagcacctagtgtatggcaggatgggctgagaacgtcacacaagcattataactcactgggttagaatcattccaggtgataagtagccacaatcagggtttgaacccaagtctatttgattccagcacgtacggtcacttgcaaagtgaacctgccttcaaggggctcagtccagtggggagagggacccagtacagtcaaagatggaccacaggtcttctgagcccagaggagggagaagtcattagcctgggagtgaggaggccagaggctggcctcacctgcccacctcacttgtacctggaagtcatgggctctgagctccatggggctaggaatgcacctgtctggttcatcagtggcctggcccccagcacagggcacaggaaatattgccaagtgaaagaatgaaccaaagaatgaacctaacttgaatcttgggcctttaaattcccaagacaacccctttccattgcattctaaagctttgcaacacattccaatttcctctccagatctggaggactgtcccttgctgatttaggatatttccagacctagtcagtgaggaagctcgaataatccaggtcatcctccagctcctcagggaaacctttccgtgggtcctagatctctggggctgataggatacagaaccctgccacccgggtcagcacctgccaggtcagggccaaggctcgggctggcgaactaggtcactgctcctcattcccagggatcctgagacccctattctgaagggaggtcctcctttcctcctccagcccctaacagttgctgccttacttctgccaatgttcctatcatggtcgcaatttcgggtctcctgcagaaccaagaaacgcccctgcctcctgtactgtccacagtgccatgtacaaaacctggcacaaggaagcactcaataaacccagaaggtgttcagaaaacatttggccctgaatggggtttgctggttggtgacatcttgagtgacagtgtttggcttagctactatctgaatcccctagagtgtttggaggctggcagggtaaagaatcttaaatgctgcatggattcccttggcccagtctctaggccaccaatgttcagagcacctcagaaacagaaggcacaactttcagctgttgtggccacaggaagaaagtcagactggtaccttctcaggctggagagaggccctttgttcccagaaacctcctgtagtgtctgcagcagcatccccaagaatgccaggcttccagaactctggcttccagaactaacaatacaagaagaatcactacgataggccaccatgttggtcgtactctcaccctgggccaggttccgtgccggcgcattgccagcctcacaataaccccaagaagcagtactgtgaccctcacctccacttcacagaagagtaagctaaggtgtggagagatgaactgacccacccaagctcactcgccgccagcccaagcagccattttgaggctcatttgttgagtacctactgtgccaggtgtagggagacctctgtggacaagacaaaattggacctgcccactctgctcatgctctgaactactctgagagcaatagtcaaggtatctctggagttcttggggcaacagaaggagaaggagcaaagcatcggtgtgtggagagacaaggcccggggcatggagcccagctctgccactgatgtcaggcctccccaacacaagcctgactcttagagagactgcatgggggagtgtcacagttatctagagctgtggaacgtactaccccgttctccacattctagggtttcccatgattctgtggttggctgggctcagctgggtagttcttccacaaccagctggaatacctggcgtgtccctgtggccttgggttctccaggacctctctccacgtggtctcgccagcagggtagcttagacttctttacctgacaactgacttctgagaggccctgctcttatctcaactactaagctacattaccacataatagctgaattactttggacaaattcgttctgagcctcagttccatcatctgcaaagtggggattaaattgtataatatacgtagagtgtggagccaatgcctggcacacgatcagcactcaagaaatgaacattttggttgctgtcaatctaggattgtcagagccacagactatctctgagattcaacctcagctaatctccagcttcaggagaaggtgcagtgtggtgggtcaagatctgagctaagtatcaggagccttgagttccaatcctgcctccaccgccacccagctgtgtgtcctgcaacacctctcataccctccacatccccctgtgtgaaagaagcatgtctcggccatatgctgtgagcctgggttattagcaaagagagctctgagaagtacctaattctacccagatgtgctctgtgggttctgagggggagtgcacaggcccgggagctcctgagcccccaaacctcccctgtggtcttcctgtgctctctatacatcagtacacatctccccaactggtggaaaggaagtaacaacaaaaaggagcagacaatgagaagaaacaacattttttttttctcgtaaaagagaaacgggaaataagcagaccaaggcagagaggtggtcagaaagtgatggcaggagagggagaggcggtgcagggtcagggagatgagagggtcaactccaaacaggtagaaagtccccacagggaaaaaccaaataaaataagtcatgcctctaattttccttgaaaggacttctgctgatcctttgtgttcacttcatcgatgtaactgctcgacacccctccctgacggcaccacttccacagtgacctccttttcctcctagtctttctctccttccaaagtagagaccccacccacacactctcaggggggagcaaacacccacctgcttcatccccaggaaatgcaaagctcagaggctccacaagcctcttcccgcagcactatggctggtgagttgggccttcacgaaagagcttatttccctgcagctcaattaaaagcaacttcattaagaaaaccacacactcagccaagctggaggcatccagacagcaggagcagaagcgcactgaatgaggcctgcgggccagggcctccaaagtcctccccagacctggctcagaaccctctccctccatggccttcacccttcttggactgcttcctcctctctcacctgctcactccagctggcccctccctgggactgaggagagtgacataaggccattttcctgagacaggccctgtccgcaccctgtaatgtcttgccaagctggcctggtgccccccaaatgcccaggttcccaatctgggaaaagggcgctttgcaatggcttgcaaggccagctcccagagggccccaccctgggtctgctcggccaccacccacagagttctctgaatcatgttccttctagaggcctggcttctctgtgtatgaaacagaacacgggagcagccttttgagttatagtaaagactaaatgaattagtgaatctaaagcattcagacctttgcataacaaaaagtcctttataggggcgcctgggtggctcaatcagttgagcatctgcctttggctcaggtcatgatcccggtctgggatcgagccccacatagggttctctgctcagtgaggagtctgcttctccctgtccttctccttgtgttctcttgctctctctgtcaaataaataaaatctttagaaaaaaattctctataaatggcagttattagtaagattactatcgttactacttctttctagcctatcggcagtctggattcagtgggtatgaaaatgaaacaaatttaaaagtcactgctttccacctgttctgtcaaaatcccattgctcccatctcttagcggcattgtgagcagacctcagagctttctggtcatcttcagttactcatggtcctgtccagaaaggtttgctgtccaggctgttccagtctggcatcttctctgggcctgggcctgggcctggtcttctcgcttctgtccggcttgtggctccaaacatggatacctgctcaggccctccgcatcctcttcccgctccagcctggggtggtggacatggtctgattcgggggggggggggggggggcaccgcccactctctgtggtggggcagcttctctggcgagctccagccagctctggaagctgtcagcacggccgacctgcgaaccctgtctgtctgtctcatagagcaccatgtgggtgggttctgcggggaacctgagcggcccaccatgtagtagggatttccaactgaggacttgaccccaccccacctcaactccagccctgggtcacccaagctgaggacccctcccctggagggcaggcttgctgagcctggctgcccttcgtagcacccactcacttggccccacagagcagaaatcacacacttgacacacactgcactggcactgtcaggctccttatggccatggtgcctcacgggtctccctagaggtctgagggacagaccaatcagtctactccccggcagatgtgactggcaacttgcatgccaggcctcccttcctgccagtgccttaacctctctgagcaattctcctaggaaggggacacagaaatgcctgagatgtgactgttgccaccgttccctttcccagtcttcttcataccccagaaagaagaagggctgggatgggggtagcaggcctttgaagaagccctgaggcagctgcccggttctgcctattggcagctcttttcagaggatgggtacttagcacctctagcctctattttgggccctcattgccatttctaggacatcaggaaaaatcccactcaacttcctactcatcattattatcgatttaatcatgaagccaagatagaagtggggagggtaaatatagaaacagcatgttggagacaggctgcctctcctctgtggacctgaccctagtaacaccaaacagctaaaatctgtccccagagttaacattgccagggtgaggggtgatttgacctgaatgggggagcccaggacctcccgcttagactgaccaaaaagattctggccagagagagctggaagcttataactccactcagcacacagcaaaaactgagcctatgcccacaatccttgctgttaccctggagcccactccatcctggctgtgccacccactcctgagtgcaccccaggaattaagctgagagtcagaagtactggttaggcccaggttcttgcactcaccccatgaccttgggtaggtcactggacgtctctgagccccatctttgaaagaggcatgggtcacaatacccatgttacaaggtggtggttggaattaaatgagattttcagtgggaactttatccctgtggagcactgggccgaagtggagggccaccctaccagggatctgcctcctaagcctcagccccccaccccccgccatcatttccatctaaggccacagctgtctctctctccctagaccttccggtggccagtggccagcaacatcgacagcaatgagatactcgagattcagatcttcaactacagcaaagtctttagcaacaagtaagtgccgggtgggagaggtggggcctaaagggactggggccctgccttgctccttgggctgccctctcctttgggctttaaaggggactcacacccacagcctactctggattgactgtcaaagacccccttcctggctctctcatgttgtctctcagagtccctctaccctctcaaccattgtcagccaagaaccccataccctcccattcgctccttttgtccccagctccatctcagttttctgtctccttctttaagtcttctgctttacaccatccctgggtcacagtaacccagcagaggagttaacagaatggctgataatatacttcaatagatcatctaccgccttgagggcaaacttgccaaactgcggcagtttgatgcagtagtttgggaaccaggaaagcctgattgtagattcccagtgcagccatctactttgtgactcagagctggttacataacctctctgagttcaatctactcgtttgtatgaagtctaagcatatacctcgaaggaagctgtaagaattaaatgagatagatatccattcattcattcattcattcattccccatatgtttacgaagtgcctactgtgtgtcaggcactgaaccaggtgctgaggatagcaagtgcctaccctcatggagcttacattcttcaatgaagcacacctgccacatgagcactatcactactaaaggtttagtaaaagtagttcccatacatctgtctgggcaataagcagaactcagatttgagcaatctggaatagtggctaaatataataaatgtaaagtcctgtttggagattcagaaccaattgcttttataccagctagagggggtcatggatgaacagcaacatgtccagaaaagcatggggatattacttgctgagagtgcagtattactcattagtgggaggagactacaaacaaaagaaaatctgacctaatcctaggtcatattaatagaagtataactatcagaacaggggtaagggatgagggttccactggcctcatgctggttggaaaggataccagtaggcagcgccttggattgccaggggaagcgacttaaatctgatgaggggatgagagcctcaaggagaaaaccacagaggacatgtctatccttccatctatccatcacttccatccattcatccttccatccatccttccatccattcatccttccattcatccttctgtcctttcatccttccattcatctaaccatccatccacccatcatccatctatccactcttccagtcactcatcaaacattcactgagcaaatattctgtaccaggcagacactgtgctggaggtactgaagtgagagattaagtcaccacacctgtgccctaagaaggttttctgccatttggagcaggaaaagagatgtgtgcccagaggcaggaccaggaccaggttgcattgctgggagacaacagacagctgaaaggtagccagagctctcaagccagtgagctgctgggaagtagtgagctcctcatcactgggagaggccaagcagagagtagaccacaatgttgtggaggggatttttgaactggggtgggctgaaccacacaggcttcaaaggtttttattgggagcccataacatctcagctgagcatggggtgtgggcattttaggcctcctggcaggaccagaagggaagatgtttagggcagagaggcagcctcttggcttgttggggtatcacatcattcaggcagctgctatgacatccataagagaggttatgagatacctcaccaggcgtccccaagatgaagcaaaactttcttccctggggtgagagattgggtgatctgtgagtacaggagaaacaagaacaggagaagggcccagacacagaccaaagtgggggaggaaaaaaagaattggaagctgagggccaggagaggcatccaggcaccccagcagggacccacatgcaggtttcagagcttccgggagcctcagccagggtaacccttgtgcacagatgaggaaactgagtctcagggaagatactgagaacactggatggtagcagggctagtgctaggatgcctatcttccttctccctttctaatcctggacctcccagaaaaccagggtatgtgagcagtgattatggaaaccactgacacgaacaagattggtgtactgtttacaatgaaagccgctagacagtcacagaaatgctggaaacccttggaaacatcaaaactcctactataaacaaatcagaagtatttgttaaattgggaaattgaatatcatcccagtgaatacattgaaacttcaggcttcaattagttgttctgaaatgccaacaagagagagccagagcaggggagtccctaacctatttctccccttcttcctctttccccaccctcccttccccctacttaagaagcaagaaacccctccagggcaggtctgggcctgctgggaaagggtcctcttattttcttggaaaggatggaaaaatggagtgactatctcgaggacagcacaaggcccatccagacacaggccagcttgggggttggagtgggagacagggtgcttggagtcagatggggctcaggtctccccaccctggagttgccaggctccttctcattgcgcagctgagtggagggggagcctctgggatttacactgagcttaggagccaccagaaccacacctgcgcttgggacagtgcctggccactcgcaggtccccgcttactttgtggaatgagtgaaggaataaatgcccccatggggtcaggagggagagggtgtgcaggctggagcagtctggaagcagaaattcaaatggtccttcttctccgaaaagtttaggacactccaaggtgacagccaagtcacgtgactgatgcttttggggaaactgaggtaaaggaagctggtatgagaaacagaatttatggtctcatcaccacctatctcagagaaagagacttgtcctagaagcagaaggtggcttggaaactgggccctgacccagtggtggtaggggctgccaggaggatgagtcatggtgtgaaggaagagacaccaggagacgccaggtctgcccagcctgccttgaacaggtcctccttcaggaaccttgggcctcctgtgaggacaaggtgtcaggtccagaggatctggggtgtccccctttccagtccggaacggttgatgaagaatggcctgatggaagtgccagtttcctgggacttctgaataattcaggagccaggagagcagcggtggcctgaccaggccttgggcacttgacacgggctcccaggggaaagcaatgaattattgacaggccctggcgcctggttgccgctctattgtggtcattctctgggaccatccatgcctgaggcccccctccctgctgccccagctcagcccacctggccactctggggagggggggcagccagcctcccccgcggctgtgggctcttaggggatgccctctttgtgatgggcagtttcagtgggccacgtaagagaggctatcagaagacaaagtcaggtcccatctccttcacctaacttgggaaaactgaggcccagcaagggtcctggctcaggatcacacagcaggggcagggcagagctggccttcagctcagacctcccgacccccaggctccttcccagaggacaaagggcctcacacctccactttccagagaaaggcccctgctgtctgagggcttaggggcacaccctgcctggtcaccccaggccccaccctcccaggcagctcctccctgctgacccaccccaaggagaagaggcaacaggcagacctcactgggtgtgtagccagggtgggcagggaggtctccggggtcactacacaggcccgagctggggcttcctgcaccagctccctccctaaaggagggagggctgtggggggcatcttgtgggaagctgtattagcacacctgttctaaagctttgttttcacagcaagcacaccctggttttgcttagatggtacattttggatggacctgttaaaaaaaaaaaagctttataaaaatgcttttcttcatactttacataagactgagatcatctcaatcatccataaataaaataaaaacactggtttttattttcatttggaagaggttgggggaaactttcagaagtgaaagccccccagccaaattatcccctgggttccagggtcccagccccaccctctgggcctcagacagacccctggctctgtgaggctgcacatctgcccccggagcctaccctgcaaggaagaccttcagaccagcaccccgtgggccgatagcaccccctcccttcctgaagtcagtggagggaggacgggagggcctctgagcgcagcagtgtcagaggagtttcacttgagtgctctcactgcctcccagtaaagcaggtagtagcacctcctttgaggagacggaaaaaaggagggctcagagaggttggagagctagcctaagtcacacagctgtctacagggccaatccgcttctgcctgactccagggtccaggctctttctgctgtctacactgctcctgttaaggataatggcatccagtctgtgtgtggacaaggcttagaccagggcgtgaggagtggggagtttgccaggaggtgggccacatagcaagtgtggttaaagcagtgagaacagcggtggagtagcgagaggcccatcacagagcgcctagcaggggtggaggacacgctgggcaagccttcctctcaggccctccaagtctagggtctgagactgacctcagttagcacttgtgggggaatggctccatcctgccccctgggggtgtcttgtcacattgcagcgtctctgcagatccttcctctgctgtgctggggcagctcccaggaaagatgtgcctgagggtcggcactcagcaggtgctcagtgggtcctactagaactaaaggacccattggcaaagggcagcagcggacagggatcccagccggcatcatcagcgttacttggaaacttgtcagaaatacctattctccggcctcagactccgggcagcggctgggcccgtggtgacctggagctggctcttaccagctctaagggcagatggtgcacatctgccaactcggggttcagcaaccgttggaagcttgcactcggccgttggtgggagtactgacaccacagaaaccggcaggagccacgggtcaggactgttcttctccacggccagtgagttgtaaacagttcccggcacaaccatggatgggcaggtcccagtcgtccatgttttaacgagccctccggaagattctgtttatcctgaagtttgaaagccactgatttaaaaccaaaagaagtgaagctgccaaaagacctgtatttttcctaactatagtctgttgttagaatgtctacacagtgcagaggctgcaagcccactgcctccttgtgtcataaagacaaaaccaagactcaagggcagctgctccaggtcccatgaccccatcccagcatttctcctctgtgggcactgcccaagccagggagaggctgggacgcagccagaagggaggcctccgctgggctgggtcttagaagcacccagaagcagagtcgggctttccagtggaggaatggcgtggagcgttttgccctcgaggaggcagggcagctggtggatagggccctgagcttcagagggaagcatttcctatttgtcctctctggctgctcccaccacttcctcccctcacacagatgggaggccttttatttcccctcaagatttatttatttattagagagagaaagcatagtggggaggggcagagggagagagaaagagaatcccaagcagactccaatgcagggctggatcccacaactccgagatcacagcccaagccaaaaccacaagttagccactcaactgaccgtaccacccagacaccccaaaggagcatacttctagcaaaaccatttcacattctatgtacataaaaagccatttctcacctaccagatggtaataaattaaaatttatatttttactttttaggctaggtaacttataaaccacatttatttcttatagttcttttttactcttccttttttgttgtttgttttattcatttattttaatttttaaaaatatttatttatttattcatgatagacatagagagagagagagagagagagaggcagagacacaggctgagggagaagcaggctccatgccgggagcccgacatgggactcgatcccgggactccaggcagggccaaaggcaggggccaaactgctgaaccacccagggatcccccatttattttaatttaaattcaatttgccaacatataatagaacacacagtgctcatcccatcaggtaccctccttagtgcccattgcccagttatcccatccccctacccacctcctccccttccacaaccctttgtttgtttcccagagttaggagtggggggccttttttaaaaaaacagtgttcaccttctgtgttcctcaggaaggtatagacatcagtcatgtccattaaagtcagaattcaccggatgcctcatctcactaggatgtgtcccttcccattttctcgggctccccttcctcccctgtaaatcaagggcagtcccgggtgatgtctaggcgccccccgctctcacacactgtgggtgccccctcggtctctgcctcttcagctcaagacaatgcatacgttttaatctaccccatgtggaatcaccatgggagaacatctctctgagtgccctgttctcttccagagcaataaccttcaaaccgtagggtgaaatgaggttcgagtcaactcagtcagcatttattaggcacccactgttgttcattaactcagccagcagatactgagatgtcctgtgtgctggaaatatcaaatcgaggctggaagtaggaaaaatagccaccaccaccccggccccctcactctgctctggagaggctcacagtagagcgacacccctcaataccaaccagaccgctctggcagtgctgactgtgtgcgagatgctctgagggtctcagctctctaaacaatctggggaagtggggattattggctcattttaggagaatccagactgagagagcctgagttgtcagggaagcaggtaacttgctggtgtcagaggctgtgctcttcatagcactgtgctcccctcctctgctgtcaggtgggatatgtggggtttccacaaccagatgggcctttgccctcagtgggcttgcagaatgcaggtgtgggcatagcagacaaacaggggaccagtgagccagtggtgtcggtggtgggtagagccctcagttgtggttagacaggtggaagggacagaagctgttcatgtgtccaggagcttccagtccttctccaacaacctccacactaggcatctgggcaggagctcagctgaaccccaattccacatgcccaaggaccacaagcaggggggaccaagcccccatctggggacatcccccaaggctgttcactgcccacgaactctcccagggaaatgggtctcacaacatacaaccattcatgcttgttgggggtcacgttccctcctagacatgctgcccgagccctgaacaccagccctggctctggggccaccctctcctggagcctaagcaagccctccagccccccagcctactccccagccggtcacagcctcatgggatgtcagctccttactctggcctctttgtgtgaagctgccatgccccctctgccatccacaggctaatcgggaccttccgcatggtgctgcagaaggtggtggaggagaaccacgtggaggtgtccgacacgctgattgatgacaacaatgctatcatcaaggtgggtctgtcccagagagtccctggacttgccctttatggggtcccctggaggcctgcttcacctgcctcctctcacacataaggtgggctgggggatgctcctaatgggtggtgaggtgaggcaagaggagacccaggtcagatggctggagctcctcagcctgggggctgtggccagagcccttgatgatggtaggctctgctctcccggggtggggggacagcatctgaaggccagcctgagccctgccggccacaccaggcatgatcttcactctgcatgcctgtcctggagcctctctaagactaggcattcagcaagggcaagaaccttgttttctattcctgttgttacatcctatcctagcactttcaacgtgaacacactcatactaatgatgcacactccatacctcttctgacaaagcaaggaaatgagctaatctggaagctcagaccctaggctctgctgtgatgcctttgtccccatcagctcattcatgtccactcacggccagttaggccacactgaggaacacaaccgctatgtacaaatcctagttaggccattaactgtgtgacttgggtaggttacctaccatctgcaaagtgagcaacattatagtctctgcttcaccggaattgttctcaggattaaatgagaatacacagatagtacttagaatagttaggcacataataagcgctcaataaatacataaaacaattttggtaactattacttcctgacctcagcttgccttgtacgtaaaatggggttatatcatggttccctcacctgggtcctgcataatgtatagccctatgtggtaggcagcagaatagcctcagaaggcagggctgcagccatggggagccagaatacaaggaatgccctctgaggagtacgaagggtggtgcagaaattcccatagttccttgatatctcaagatacttccttgcagagaactggagagcatttgggacttcatagcttggccctagccaggtcattctctccatgggcaggtgtgagcagggctgctttttgaagtcaggagggctcagccaccctgggaaagggagaggggatgcagaataagctatgaacaccagtgggaggaagtgagatgagagtgaaaggaagaagtgggcagggacaagtaggcagcacaatccatcccctgtatttctagaatcaggctgaggaaaggactcacagatgatctggcccatctacctacctctgctacccattttgtggatgggaaccttgggaaatcctggctgaaaaataaatttagtcaaggtcagacagctggtcaacagcagagccaacactggatgagacccagggcttccaattccaggccactatttttctgcaacaacatacctggtcacatcaaaagggccccattgagtcagtgcgaaggacatgaggcttggagtcagcccaactgggctcaaatcccagcacgagcacgtcctagctgtgtgactctgagcaagtaaattaccctctctgatatgttaggtaggatgagttgaagtgctgagaagatcaaatgagtttacagtaaaacgtctagcatagtgaggcttcaggaaatccatgtaccttttccttccccagggaatctaagcctgggcagggggaagcctgtgtgccaagcaaaggctgcctgtgtgggtcgcaggggcaagtcaacccccaacctgtgaggaagggcaagtgcatctgggagacatcccgacacccacacaggctgaggaaaggactaaaataagtcttccctgtgcaccggggagaaactagagctaaaaggaagtaagtggctccgaggacccagagcaaggagcccaaccagatgcaccggctgggcccaggtttggtgctccactttccccagagaaaagcccagggtgacccccaagtctctagggtaggacggcaggtgtcagctgagcaggacggagtgctggccctatgcccctggagatctctggccctcctctgaaggctcagctcacatcacatcaccagcatcaggagtgcagggaggtcagccccgcttctgaggatgagcgggtgacctctgccctgggaccactgaatgacattcttgattatgtgtacggtgccctcagagagcccaccacagtctaggctcagctgtccaggggtgggctcctcaccttgggcaccggggaggagcagaatcaagtgcaggaggaccattaaaattgactgagcctgtgcatctcaatctttctgaggcatcggtttccctatctgcaaaatggaggtgtggggaggattaacacccagtttgtgttcctccagccagtgaaggaagcgaaagcactttgtaaataaacatcacaaagcagcggagtgtgcacattattgctgtctctgttcccctgctcaccacccacccctctccctccagaccagcctgtgcgtagaggtgcggtatcaggccacagacggcacagtgggctcctgggatgatggggacttcctgggagacgaatccctccatgaagaagagaaggacagccaggagacagatgggctgctccctggctcccgccccagctcccggactccaggcgagaagagcttccggaggtaacaacagcccaggctctctggccacccaccaccccccaagacacggggaagatgcctggtccctctcgaaggcccctccgggcctgactgggctgagagtccagggctgagtttctggagagacacaagaggcaagaaggtgtttctacagggccccccatgcttatcccccgatcccagggctcactcgggaggcctggtgtcggggatcaggctgagggtccaggcctcttgctaccctgtgacgagttctgggagggtgaactctaacttggggcgaagaggctagaccccctgccctaagagaatgggtaaagcagataggagggggccctaccctctctcgcccaagacccagtcatgccagcccagcccctggcagcctgccatccacctgggcccagtggaggcccaagagagggaggccttttcctgccagggtgaagccaaagtcctggtcgggacatagcctcacttctgttgagaaaaatatatcctggcccccctcagtgttaaggactcacacctgcaagtgtcctgccacacacgggtgtcaggaagctgtgtccaggtcagctcattctaaggcatgattttttccaaaagaaaatgcagttgtattaccattagaactcagagagacagactgtaggttagcaaaatgttggctgtagattcctaatccactggaaataatgtgtaacatgcaggtaagtcaacggtgtatctaaagttttagaggagaggatcccctcccagtgatcgcccccctccaatctccctttccaaaaaaagtatattcagtccctgctctgaaaaaacagattctaaatcagtgcaattgaattgataaatttttattagacaaatatgcttttctttgtacctgacccacgcccctccggccacacacacacacacacacacacacacacacacacacactatataaacctaagaccctgggagccaggtggagagcaatagtaacaaggtcaaaggagccaggagtgtggcaaatacaggggaccttgggctccaggccagcagggagcagcagggggtggcatcacccaggccagctgggagcctgtcctccttggactctggccagctagctggaaaggagatgcaatttggcctcaggaggcccagatctgagtccgggctctgcctcttaccagtctcgtgacccttagccagtcgcataccctctcccctgtccctcctaacctgtaaagtggggcccagaataatgagaagcactccccaccctgctgttaggagagccagaaggagcatggggggcacggggtgtagctggggtaccaagtgctaccccatacaaggactggtgacaaacagggtcttggcagctgaacaatgcaaacggtcaggaagggggctggaagtggtgacaggatgaacaggcacccagtggggaggcaggggccacacagagggtacgtctggtcccagtcctctgttcccacacaggaaagagcttggctgggactgtcagaggtgcagctgggctcaccggcaggggacaagactgagtgccacctgagggccagcaatacaggcaagggagcactgggcctgagtcaggggagctgagtcccgtgaagtcccatcctagctgccactaactagccgagtgactttgagtgagttgcctacccctgtgggccagttataggaatgggttgaacatcctggctcctccctaactgtgatatcccgaggaacccagggacactggatctcatggtagcacccacgtgaaacagctctgggagctctggacagccgagggctgccctctctggctactgtagtcggggatgcaaagccagtttctctctcatcctatgagaacaggccaggaagctgatagaaggggcacgagtggatacaccagagcaaaatggggagctgtggtccccagacctgcagaggtctcctcccatccttcctcagccattgctgggctttcctacctctccctgaccttcatgtggcctgtcccagggcagcagcaggaagccagagcaggaggaagggttttatctgggatagggaattgggagaagctgacaaccgtggtcagagccccttgtcatccagatgccaccgccccgtatgggaggggctgtgtgagcatgtgcatagtttcctggctgccgcaggggctgctggtccagatgctaagagcgcctttggggttggtgtctttgccaggcctagccacaaagccagcaggctgggtgtggggaagaagtgagaagcttcagggagagtcctttactggtgagaagaaggcggagctgttttagagcctttgggcttatcctacagcttcattctggctgcctccatgggtcaaagcacgcgggtggcaacaaggacttgatgattgacctcacggccctaagtgttatgtctcacccttatcatataagtgccaactagccaggcctgtcaactctggagagtgggtggaagccgctgtcttctggaccagagagccctccagaaaggcttggccagcaaaggggcagggagaggaaaggatgaatgtgcctagcctctggcccccagggaagtcttcccttcccgcgtctgcccctggccctccatcccctcctgaaaggcccacccctttgcagataaaggtgctccgtcgaccaagcgcctctctcatctctcctctggtccatcaccagccacaagaaaacctcattgttggcaaacagcagtgtctcacctggtcctctgttcccataggggtctggttagagaatccatttctgcctgtctgacttggctcagtagggtgtttgctggagggtggtggtgggctggtggagtgaatgggtggagaatagcctcagcccctggctggcagggactcttccatggatgacagaggaggctggtgcaaggaggtccaggcgagccatctggcctcaccaccccaggaaaagctctatagaggctccccttacgtaagggcactctatctcaaggcccttagtatcttcctggaaatttctcccagttgacctcggggaatgtgtgctggcacctctgcctgagcatgccctccaaaccccaacccagcctattaacccttccctcccacagttccatcgatcccgggccctggtcagtctcatcctttctgagcatccccggcctacttctctagtctctgccccaaaccaggggcccttgattgtggctgggtctctgtaacacaccctgggaatgttccaggaggtcatgtagtgccatggacagaacagggctcagatcccagatctgccctttggagccacacttccccacttccccacctgtaagaggggcatccctagtgcccctcaggagtgttaggatcacataagatgctacatgtgtattgcccactgtggcacctggcatgtggtcggcactcagccaatgtctgtcttccagagcctccgtgtcactcaccccaacttccaccctgaacactatctggcctttgggtccaagtcctgctattaagctccccctcagctctggccactccaccctataccaagggttctgtgaacaatgctgctgacacctggagcctcacagcagccggggcccagggcggggcctcacttggtcacaggggtcccctcgcctcccacagctgtcagtgtggcagagaaggaatgaattaccaaccccgtgggccctttgctctcaaaaacgcaaaatcagggtgcaggccttgcatgttgggatacatctgccccagtctctgaagggagaggagactttggtccagaacatgtatgcacacactcacaatcaccctggtgtttgcacacactcacgtgcacataggttctctctgtttgatgccagggagctgtgcacaccactgatttctgggatccggtgcagtagctctaggagtcacatcccagaaggaaagaaaggagccccagctttaatcttgcagctcctcttggggctttcttgcaaattccctctgttctgcaactctttcttctcatcttctccacctgcctggccctcctgcccttcatggccccacctccttctgcccacaccccctacctgagaagatagaggttcttatagggctcctctctgctgtgtctcatcttgggagcataaggagggaccacttttcttgttctcctcatggatcatcttttattccagcagagatccatggaagctaggtatccctcctacgcctgaggtcagagggcagagggatatcctcatggtatgtgtcctggggtatgtatggggtcagcacagccagcctcacccccagagctctgctttaccagttcccatgatcccttcccctgatgatccccctcatcaggctgagctccagagaggccagagctctcaagcagcgcagaggagccagggtcaaggccatgctgagatatgtggtgaagcagtgctaaagagactcttcccaaacctagccatttcacctgaggttggactcccctccatccccaacccaggattaagtgtttgtgtgagtcctggcactgtgaagcacttgggtcccagcaaaccctggagttccccagcaggctaccatattgaatctcctaccctgtgacactttcagtggcacacccagagcaatggggatgggggtgtgaggaagaagtggagtgaaaccaagccccagagaaagagaatgctggctggggaatagaacttacctggccagggtgggacagtaaaaccacaatgtagactctaggaagaaagtcagatccattcagggcttcactgagaggtcccctagcaacagggacagaggccagttcacatcctacccctattgctcatggcggagtgactgagggcaggctgaccacagaacctcgaaggtttattattaatgttggttgtatcctagtagtagtggtagcagtattttttcacagaaaaactgtccttttcccttctccatttctacactcagagtgtgggtctatgtgcagcccttttgtaggcccagaggcctagagcatgtgaggaggggtgtggtgggcatgtcgtagacagtgtgcactgggctctgagtgcaggtcatgctgtgccttggcctcctctctgcctgagcagaccccccactgagccagcctgatgcttcgctgagatttcagagcaaaaccgaaagggagagagaaaaaaacatcatgtttttattgttcaggtatataagttcccccttcctgttccatcctttgccaatcctagatgatacagtcccccttctggttcctctattgcaatatttttcaaacttttcagggttacagagggcttttaaaataataaacaagcaaactccctgaaaacttggatccaaaattcagagaaaggtagccctgtttgggttaatgtgggggggggcagtaaatctcctgttcagccctcattctcaaaagctcattggagctcctgctccactggagcacaccccatcagctctcagtgggtcccagtgcaggcccatggccgtgcctggcctacctgcccccaagaccagccaggcctggggccactgcgggcctgctgagacagcctccccttctctgcagtgcactgttctctgatcagtggtctcagcggatttcagcaggcagagacctggctgacgttgattactttgaaaagaattacaaactgaccagcttgcctaatggaaaagattactggccaaagctgcacttcagctgtgatctatctaggccttcaggttctgagctgtcagggcacagagtcatgtctatgtgggcaaggcctgggccagtatagaataaggagaggtaatatcactaactgccatctgctttcttttcttcattctctctgccacagcatcagggaagcattgagagaacattccagaagggttttctgaaagcctccctaaagaggcttaccctgctctgagccccagagtggtagctctcttactgccacgtgcccagaatctgcccagcctacctttcctctcagaggcccccagagcctgggagcggcccattctgttgggaggagatgagaggaggaaggaggtggggaggagcagggtggcccaggcctagagggtggccagactcctagaaccttgctttccctgaggcatctgagacccacattagaaatcaccagacccgggggattcctgggtggcgcagcggtttagcgcctgcctttggcccagggcgcgatcctggagacccgggatcgagtcccacgtcaggctcccagtgcatggagcctgcttctccctctgcctgtgtctctgcctctctctctctctctctctgtgtgtgtgtgtgtgtgtgactatcataaataaataaaaattaaaaaaaaaaaaaagaaatcaccagacccttgcctggaaatgaaagagagcagctgatccctgaggcctcctccctgatcaaggctctaggctttcctgggcttggcgttgggcgagtggccacccagccctgctcctgtgaccagggcagagcctgggactgtctgatccttgccctacagtcttaagctgaagtgagaagctgtggggtgaggggtccctgggtcaaggaggcccctggggagtgggggtctgcagggccaggggctaagtctgcaagtgtctctagtccacaccctcctcactcacatccccttgtctcctcatttctcctcccccctactcagcaaaggcagagagaagaccaagggaggcaaagatggcgagcacaagtaggtgtcccaggccagggcggagcccgtggggcccaaatgcttctcaccacagggtgcggatgtcgggatggcctgtctcagagggcttaggtgtgggctatcctggtggagccagccctgggggatggcagagcgagggcggtctgtccatctggccatgggggggtgagggccagggagggagggggtgggagcggggggtgggcaggtgtctgggcctgctgtttccactccctcctgcctcttttcagtgtcttgactcttcttccacttccctatccagctctgtacccatggaccaggcccttaggcttccctctgagggagggtatgactctaggcagaggagtaagggaggctcaagaagccactggccacttccccctaagagtcaaggcagggctgggcaggtggatacacaggcctggaggcccaaggaggacagactctgggcctggagtggccataggggtggctggagcatgaaggcccagaaagctaaggggagatgagcagatgagcaccttctgtttgtcctcaccatctccaaccccgaaaaggcttcctgtgagagggagagatcagagggagaggagagaggtggaaaccccagatgagaggagctggccacaggagcttggaaaacctcatggcctggggttgatgagtaggtctcacagagtcccccagaagcacatgccatctcaagaactctctagcattatggggaatccataggaatggtagcagtcagagctgacaagctggagggggcctctgggccaaagccctttcttagagatgacaaatctacgtcccagagaggggaagtaacttgccccagaataggatcagagctagaatgacaacacagggaatctagcttctgacccagagtttacaatagacccagggagtttagagcacttgactgtactctaaattcaatttaactctccaaacacactgacgtaagctgaaaagccaagcgtgtggtctttattttccagacagggaaactgagcttcagagatgttaaaagatttgcctcagactgtggtgccaataagctaaaaaaccagttgacatgaggacatcatggggacaccaggattgtgccaacaggggtctgaggtggtcagcacaggtatgggcttgagatctctgcttgctttaaaaccccagagaactcaccattgttgtccattgccttaacaaaaacatactgagttccaactccacttgtgacacacaagcaaaagcacaaaagcgatggcaccgcgtggggaaagttcaggccccaccacccgaagagtcaaggctctgagcgagggaaggcctgaggcagagcaggtgccaggcttggagtgggagcctgattgctgaatccaggggtatgtgagtgagagatgatggcagatgctggactgggagtccctcttagggagaggtttccaggggtcaggttcctgcttggccgcttagctgtcaaaggcctccttaggagtgtggaccacctgcccctcccccaggctctgacagagtggtgaggctctacggcacttcccggctgccagctccccaggctgccggaggccagacccccagccattcaactggttcccgagtgctccctgatccgaatctcttgtcatctccagttaactcctggaataaagtcacctggcatttttttattcttatttaaatgtgtagagcagtcagaggattgaaaagggaggaaaatgagatttctaaaaagagattataaaggaattgaagggatccccgggtggcgcagtggtttagcgcctgcctttggcccagggcgcgatcctggagacccaggatcgaatcccgcgtcgggctcccagtgcatggagcctgtttctccctctgtctgtgtctctgcctctctctctctctctctgtgactatcataaataaaaaataaataaaaaaataaaaaaaaataaaggaattgaaactcctctgcctggggaagaaaaaccataaaaacaattttgaatctctgaaagggtattttgtggccaggctggctaggctggagctccaccaaggagaactaagtggaagtatgtgcaagtcgcagtaggaagaactgaaagagccagccatgaaaggactcgtgctccctgtgggtgcgtgagatgctgggagaggctggcctggggaggtggcgctctgttcccatgatgctgtttacttgagtcttgtgaggggttggccacaggggagggccgaggagtcagctccctggtgaactgtgagcctcaggacccaagggcctcctagcttcctgctttccccagggcgcatgggtaaataggccaatcaggagacaggttcttataggaagggtcgacctgtcctgcccaggtagaggaagatatttgaaactagctaaacctcaatacactgtgagaaacaactctacagcctgtgattatgaaattagtggtacttgggacatgaggggaaaaaaaagaaataaacccaccaaggggtactggtggcacatgcccccaaggtttgaaaatgtggctgtttaagcaagcagagagccagagaccctgtttcgctcaggcaggggttcctccaaattacctgaggcctgagcctaggagcctggattgtgaggaagcccaggcctgcagcccactgtctgcacagcccctaagtacgacctccagaagaagacacagccctgaattactccaacgcccggttcactaagcttattttggccaaggttcccaagtcattttgaatatcaagctctcctccctgcagggccccaagtgcatcacccaaccacgacatccttctagatctgagccgtggaaccagcaaataaatcatcagacccataaatgaaagaaaaagtttacaaatgagtgaactaactttaaaatcttttctctagagggaaataatggtctgcattgtaggtgcatatcattctgcctgcagtaaatccagccacggggaaacctaaatgtgaccataaatcctcagagggcccaaagggcccccctccccagctcctgcttcggctttctttcctgaagcgatgaatgaggagcaacttggtcacaaagcagtttttcactgagttgattactggctttttatctttgtctctttctcaccatattgtatctttagtcattgaagaactcaattagaccgaaggcagcatttatttaaaaacaaaaactcagtacgcgggcacaccagtaacctcatggatagattacacattttggaaatctaagtctttaattcaagtggataatctttgaagaatccctgcctctgttaatatttatttcaaaaatcacctttaccctttgccaagagaagcaggcatgctgcttctgggaagtggtgcagtgataggcaggagaggctgcttctattggtgaacttctgaagtgtcatcgatcagaaaactccgaagggcagggagagccgacgacatcacactctactgcacactgtccagatggacttaagagcgagtctaggagacagaaacaggtggaaagccaatagtaagaattctggaaattacattcaccctacacattctgcatttttcatgaaggaataaattgtcatttggagacatttccagtatataggagtagcatcggtaaacctgtccacttgagatgcttaaaattatgcagggtctgagaagtcgggtttctcctgtgattggcttcaggttatggtagagaatagcaggatagtagagtttgttttgttttgattttaaagtatcaatttttacttccaaatatgtttcttttagggaagaaaatgactttcaaaggccgtaagtgcccccaagggaagccccaggcaactttccccacttgggtgggtcctcagaccagcatcagaaagccacaattcctagccactcgagccccctccaggcctcaggtagcacatcctgttccaggatgccaagcctctggtttctcaggcagggcctgcttctgactcaacacagtgctttgacctaccatctcagagcactttcccaggagctttatggcaaggggaacaggatgggggtgggggtgggggtagcaacccagaggagtgggggttgaggagcaggctgtgtgtgatagcattgtgtaggtcacacagagtggggctggggactctaaggatggcacagcccagaaatgttcaagaagcaattgtaccaagtcaagtacagagccgtccaggaaactcccaggtaatccaggaaagcgacagtcagagcaggaaggctggacagaatggagccccaaacactgagacaggaagcaaagtgagggcttacactaggcacatgttctgtggcaggggtcagagtactgccagtacccctgctccctttttttttttaggattttatttatttattcatgagagacacagagaaggaggcagaggcagagggagaagcaggctctgtgtaggagcctgatgtggcactcgatcccaggatcatggcctgagccaaaggcaaatgttcaaccactgaagccacccaggtgtcccagtaccccaccttaaggccaccaggcaaggaaccatcccacaggtggctcagcataagccaggcaggatggtctgttctcatagccactcaattgttcctgatgaggtcactgacctgttcaatgttttgtcaccagtcattaacgttcatggcagtctcttccaaaatgcatcaaggctgagaaaatctgtgaacaagccccttctttgtacgtaaacctgggcagtccatgggactcttcacagatggtatccccatctgcaggctgtgctggcacgtggcccatacctctacccacaagtgcaggccctggagacttttcaccagagttccaaatggttacgatgggatgtaccccgatggaggagtgcaagcccagagcactaagggtatagtagtcgccagccgaggaggtgggggctctgcgcttcagccctagtgcttggagcctgtgagtctttctttgggttgaatgaagaaaagtgtatgtccctcccaggattgttatgaagaggaaatgagcaaacatctggaaaagtctctggctcatagtaggtgctcaagaaaaagtatgtcatctcttgttggcacatatgtatatacctccctccattagaaggggagaaacttcccctctcttccattgttataatccagacagcatgatgctggctagtgcggacacattagtgttaccccagcctttcttcccccacctcatgactttttaggaaaccatgaatacactggtgttttctaaactttgaactggtgcacaaggaagggttcttggttgttctttcactgggatgcagactcacagccttccatatcttgcctgggagaaaaaaaaaaaaaacagcaaagatttaagaaagtcctggggttggggtagggccagatttgggggagtaagattggtccccaacctcgagtagaggggcttgaagtttttaggccatccctacaaggacagaaaggttttgcccaacctcacattacccggcataaagatcagggggtcttgggaaccatagtcaagcttccacagggagatgcatgacccaaaggtgggtgggctctgctgtaggtgagctcagagttggaacctccatctcgccccacctgagcctacagggctacacccaggaggagggagaatgggaagaggaaggagtcaggtatcctgctcatgcaatattaatggggtaatggaatattgcactttaccccctgctggtcctactccgggtccctcctggcaccagggacctcgggctcggctgcagggacatcactgaagggacactgacggcccctgcccccttccctctgcccccctgactgcaaggcccttcacctggggcacaaggccactccaagccagagaaagaggtaggaactatggagtctgccatatgttcctgggggttggttgaaagagggattccacagtgagcggggacagacagaaggggtggaagccagcaccaaagatgaatgggaacgtgcccatctcctccctttcacagggacccaggagaaccctagggcatggagaggttgggaaagacaaggcaggctttgagcaccagggccgtttgagaaccgagccgctagtttccaccacacctcctgcttggcctctgcccctctgcccctgttcctgtccgtctgtccagacgctttgtctccggtcacctggctttctttccaacccactggggaggatgagctcggaggcaccttggcgctcagagctctgagaccaggctgagggcgctgagatgggcccaggacccgggagggctccacttaaaacctttctttgcagccgaaggtcaccttctctgatcgctgggccctgggctgctcctcggcggtgtgaaggcattggggggggggggggtcctctgccctaattccccctcctggctcgcgcttgagaaagtctggcccccaccctatctcgggaccagcacgtgagggctggagcacgaagctctctctctcacgtgttctttctcgggttttgctgtcctgtgtgtgtgtgtcttccggcggcccgcctcgcagagccgggagaagtgtgttctctgccatgaagctcggcaagaaccggacccacaaggaggagccgcagagacaaggtagggacgcgcgccccagccccggccgcccgggccatccctcagcacctgacggagaccaaaccccgcccctccgcgggccgcgccccagcgggctctcctgcgattggctgacgcggccacctgggcgggccctcgcctcccattggcggccggaggagccgggccctgcaggtggtctccaggaagggggcgctcctagcagtaagggtgggagggcatctccgcgggtagaacggagcagaaggagcagaaccctctgtggatggatgggcctgtctctgccctctctgctctctctcccttttttcctgcacgcaggagcctagaggttgttcattagggaagggaatcacaaaaaatgaaagtggttgggctagttccctatttctggggggaaaccagcatcctgagcaatgcttactcagggccaggactcactgccctgcctttccccttctcaccaggctgcagggaaggccccgaggaagaggggcggggtgggggcaagacaggtgtttggaaggaggcaaggaggacaggcaaaagacaggggaggactggatgggtaagggagctttctgacccaggtctgctgatcatgtgtcctccttcagggctcctggctgcctccctcagcatcccctgtggcccactggccccagcatctctctcagtcttgcccccacaccagttctacctgtgcccttctccttagattggagagggtagggctgctggctgaggcctaaacccaccatgcttcgggtgatttcccaggatggccaattctttaactccttggactaatacacatcagtgcagggttggttccaaacaccatcactccatcaactcttttacatggataagttacttcctaagcctcagcttcccaatctgttacctgagaatagtgcctatcttgacaggacatggatatgaggacaggaaatgcatgtataaattgcctggcactgtgcctggcacttagaggccattcaataaatggtcaagtagctattgttcaaaaggtatgtaactatggattctttttttcctaccttcatccacaaagggtattcagtgtttatatggttaatatgtaataaaaagttacattcaatcaaaattaaaaaagcaagactaggggtgcctggctggctcagtcagtagagcatgcacggggctcttgatcttggggtggggagtttgagccccacaatgggtgtagagatagcttaaataaataacttttaaaaagtctttttttaatttttatttatttatgatagtcacacagagagagagagagagaggcagagacataggcaaagggagaagcaggctccatgcaccaggagcctgatgtgggattcgatcccaggtctccaggatcgcgccctgggccaaaggcaggcaccaaactgctgtgccacccagggatccctaaaaagtctttaaagggtcacctggatggcgcgtagttagttgagcatctgacccacgtcaggctctgcactccatagagtctgcttgagattctctctctctctctgcccctcctgctcactccctctctctctcaaataagtaaataaatcttttttaaaaacattttaaagattaaaataaaaaaaagactagatataatatcaattaaaatcaaagatcgagattaggtaggcaacactgcagatagacgggccataacattctaagcaaagggatccctgggtggcgcagtggtttggcgcctgcctttggcccagggcacgatcctggagacccaggatcgaatcccacgtcgggctcccggtgtatggagcctgcttctccctctgcctgtgtctttgcccctctctctctctctctctgtgactatcatgaataaataaaaattaaaaaaaaaaaaaaacattctaagcaaatgttagacctggttcacccactctggttgttagtttcctggatgccaaagcaaaaggggaaagacagtcactatcccaccatccagtccacctaactttcttctttggcagatgaaccggctgtgctggagatggaggaccttgaccacttggccattcggctgggggatgggctggaccccgattctgtgtctctagcctctgtcacagctctcaccaccaacgtctccaacaagaggtgagtatgcaggagtctcgcagcccacactgcctctgccccttcaggcagggccccactgtgtgtagaattgaggtagcaaagaatcagggcccttggccagcttcttcctaaccccgcccctttcttttcctgaatgtctcacacctctgtccctataaaggcaggagcctattctcgggtcactgaacacctacaggccaagggaaatcacagaggtgctcagcacacatctgaacctgttgaccatttaatacctatctctctgtcacttgtgccattagctcatcgtctctgttggggcctctgagaacacctaatccccattctgtttgatagtcctggagtgtttgaagaccatgattctgtcctctgccctttgccagggttcaaccactgccagagcccacctcctcccctctacgcagtccccttacaccaaacctgacagtaccttctcctcctcaggtccaagccagacattaagatggagccatgtgctgggcggcccatggattaccaggtaggtggggcaactaggggctgtatacctttcaaactctagtggggacttctggccagatgtgcattatagactctctggatgcatggatctgagggtcatagagaaccacaagctgaatgtaagtttccaaagtaagcttgtttgtgggaggcactcaggagtgtcctaactagagaggtacaacctacagaggagcttcagaattctgcttctgctggtcaaagccctctcaggatttcacttccagcagtggacttcataaagttagaggaacccagaaaaaccgtaaaaaagatcaggaagcaccactatatatatattccaacaattaaaataagagcctgtgaagaaggatttttagggggtgtgtttttcaaaatgtgttgttttctattattttaatgcttgaagtaatgtcaatcctgcttatccatagatgatgagaatgtgggtggggttttttctttttctttcctgtgttttctgaaattaacacttaatttttttatttgtaagtttctaaaacttgagacaaaatgactgagatagggagagatttgaagccatagaattgttgatatagccacagtgcaggcagggtgggtcatgaacatggctggtagctgctgagagagggccacacaggatgcccgaatcccagtgcagccctccgagcctgatcctgagcttggcaaggccacactcccagttttgtctttttgggcagagttgatcagagcctaagaaactgagttacattaagacaactcacaatagactaatgtacaaaccagaagcacctagtacttatttataagctggaaacaagagggtccatggaccacccattgctctagaccttcccttgggatctaacaagactcagctttaggtcagaagattgtgggcattcctaaggctgagtgaatacattcactggtcagaggaaacagagccttcgggagaccccacctggctgccactgtatcagaaccaggtcctagaatcggagggagcctcctcttccaggttagagctgtatctttcatactaattgctcagaccccgtgtgtaccctttgttaaggacagctccctcacttccttggtataaaggaccaggaggcacctttctttgtatcagtacatctggtcgtgttttctcaaggacatccattgtctcccgtaatccttgcttcagtttgttttcatccagttggtgaccatctttccaggtacctaaaagttagcctcaggcagcgattttagacagcctcaagcccttgggctcctgggaggtttgagaatgtcgctccctcacgattccaccaaaacccaagcatcaaatatcttaagacttctggaggctttgcttctccagaggactgggttcagggctttgctcctctgttagttctaagaataggaaaatcccaaagaacaaagacctgcttgtctttgttttcagatacggttcactctccagtgtcaccagcctgccacataaggacacatggaaaatagggtcattgttgtgcctgttaacataactgttattttctcaaaggcttgctatgagccaggggctatgctggatgctgcgtgtgtgtgctttccatttaagtcaatgtaattcttagaaccatccaagtataggtattactacatttcttttcataggtgagaaaatgagacatgaggagggtaaggagcttaccccaggtcacacagttattcaaaggtagagccaagattcaaatccaagtgtgtccaaccgaagcagtcagagtgactaatgtctctctaattgagcctttgggacagtcacccactctggtccctgttcatctttaccttactacccactgcttttttttttttcaaggccctttcaaaatgctttttaacagacttttgtcaagtgaaccacactttctccctccaaacattcacattctgaactgaacagaacggttgctgcacttaacctggtaacacagtattttctggcaagtgtgttcacatctcaactacaagtattaacacacgttgagagagagctcttgggatgcaagtgtggacttattcttgcttccgataaatacaacagagaaggcgagaaaacttatcaaaggaacgtcactctctggagaccttggcttcacccagttgggaagagctcagaaagcgccccccgctggtgggaggagagggtttagctgaactcagatccagaaaggaccctgatggctccagtgaacagaccatggcttgcctgtcccctttgtctcttctggttagaatacatgtcacatgtagtaaaccctttcctgattattagcatctcaaaggcaagaagccccagcgtcatcccagtaaatagacagcttccccatcagagtgagcgaagctctcagcacttggcagagatgttcttggtgctcatggagtcctgagcgtgctccctgccctctcttcccgcaccaagactcaagatcacctccgtgtcctctccctgactgcaacattgcacccattgcctagctggtctccccaccctcgtagcgcctgcgccacaccaaccgctgcgccctgtcacatctcagccaccagagataaggaaaggtagacggtgtttcagaagggccacactggtgggccctgccagctccacaccaatgttctggcagcacagtcagatcccgtggaagcaggtcacagaacgccaagactcttgggttctcccaaggacggaggtatagatttacactcagccttgttccttccgatggctttcatgaagccacctgaggattaggtcccttatcttgaaaggagagggctgaatatatgattaccaagagtctccccaatcagttggtcagtcggtccctttgtgggtcaatttgcctccccatcttccaccctggaaagatcaagtcctctgctgatgacgggagaaagaaaggatggccaatcccctcctcaaaatttggtttatttctattttttttaaagatgtatttatttatttaagagagagagagtgggggggggtgagggagagagacagggagagagagagaaaatctcaagcagactacccactgagtgcggagcctgatgtgggggctcaatcccacgaccctaagatcatgacctgagccaaaatcaagagtcaggcactcaaccaactgagtcacccaggcgcccctcaaaatttgtttaaagtttcaagtccaagtgatatatttcccctccgtatagccccaggtgggggagggggaagcaacaggattgatgttcccctccaccaccaatgccatgcaatgatctcaatggtgcactttcagggttcccctcggggtcacccctcagccagcaaagagcaccctctggagcctttcttttcccacccctatctctctaccagctcctttaagccctctgcccccctcctctccccagccctttgagttctgaaaaggaatagggggccaaacgctatcatcatgactgggcttctggacaaaaaacaaaaactaaccagctgctcacatttggaaggttaatcttctgatggcatatcttatttccttatcacaccaaaactgtgtctgtctacttcccagtcttgaattacattctttttttttttttcttgatagaagggagaggatgagttagttgtgagaaaatatgacgagattttttaagtctttgccataaaaagtttcatagaggtttaaatgctatgaactactatgcaagaatattctggaaagacttctagtgtcagcttactctcttcacaatcaacttctcagagcctaagttaattagctctatttcctttttagctctctaaagaaatggtgatcattaaacttcttcagagctctggattctgagcttcattccctttggcatttcaagttccaaatagaaatgcttgctttcgtagttcaagtgttacttcaattagtaaatgttcagtttccagttctgtatactttcttggcaatgttctcactggcactgaagtttctatttttcttaacatgattagttttaatgtgctgatttgtcttggccttcagaatatttataagactttgatggacacggtggatgatgattttcatagttattcttttttatgaaaagggaaaataattttcttgagtaaaatcatatttagaagttgcatcaaagcacagcaactgatacatcaaatctccaagatgagaagcataaaagcaacccctacagtttcattagaagaatgagctgtggtaaatgctaacactagcttagcacaggctattttgttaaaatgcaagttcgagagagtcaaatgaataatcacaaacatctacagaaccctacatacaagggagactctgagaagccatttataacaatagctcacattttctagagctttctactgttcgtgacgcactttgacacacagtacctcatttaaccctcacacaaccttatggataggtctagctctgtgagcctacatggttgtctcctctcacacctggtcatggagaaggtctggggcttgtccagtgccagcccagacacctcaaatctgtccctctattttgtcatggccaccccaatgggaaccaacacctttaaatccaaagtaagaactgattgcttagaatgaagtttcaggaggggctgaaacctgggggggggggggggtgctgttggctaagcatctgacccttggttttggctcaggtagtggcctcagggtcatgaggtcaagcccggtgtcactgggctctgtgctcagcagggagtcttcctgggactctgtctccctctctctgctcctccccatctctctctctctctttctccctctctccctccatcaaataaataaataaatctttaaaatgaagattcagaaaaggtatgcacacatacctcccctcctctgccctgtatacacacacacacacacacacacacacacacacacaaacatttgctgaatgaacaaccgaagaagggcttctcagcataggtgtgagattccagggagctggacgccacctgaaaagtcacagagcacacggcatcaagccagcaaaggtagctcaggctcccaaacaaattgtacaaaaggatgaaaccaggaatgtggaaagggggccaaattccagaaacacagagaactctcagaggctttcaatcttggaatgagatacactggggcaggaaattaaatgcatgttaatgaagacatagatagcttaatccctgcttgcatgaatcccgggaagtggtttgcaggcctctatgaggccgagccacagtggctgggggtgtgaggagcatttgaaatcaccaggagctttaaaaacactgatgcctggtccccactgccagaggtgagattggcttggtctggagtttggcagggacaccagcatttttaaccagcaccttcctccttgctggtaattctagcacacacttagtggtgatccagtccatgcctttcctttataaataaagacactggggtttagtggggaaagagccccaggtccaagcagattagaggcagtgttcaccctggaacccacgtccagcactggctccctgctcctgggccccgactccaggaggagctactccgagtctcaacaggcttactcagcctccctctcctgcccgcaggtcagcatcactgtgatcgaggcccggcagctcgtgggcttgaacatggaccccgtggtgtgcgtggaggtgggtgatgacaagaagtgcacatccatgaaggagtccactaactgcccctactacaatgaggtcagtgccctgtggccgaaggtggggaaagggacttccctaaatgtggcaggaggcctggtccccgccgtttcccaggccagagccccttgggggcagtggcaccattaaagagtggttcctgtgagccaggtgctcctataaatgctgcaggggtgtcctctcttctggcctcggcaaagatcagaagttgttgccattaatcccattttataccagagaacatggaagcttctggagagagccctcgcccaggtgctgagggccagagtggggttctgtgtgcgcaccctctctgctgggctgcctccgtgcttccagagcactggccttgactcttcaaaatgacagaaaaaagcctggttcctgctcctgttctttgcagccatctgaggccacactgaggtcagaggacctcagagaccttctaattccatctccccatcttacagaggaggatactgaggtctcagtatgaaaaaggccttgcctaagagcacaaagagcgctggtgatgaagcagggcccagcctaccagcctcagcccagcactctgtctaccactttgagtggccacccctgacacaagaccttgacttagggctccagcagggaaccaacttaatcagctctagtgagggatgcccaggagcccttcagatgcctgagcatgggtcagactggcctgggggccctagccctccttctcctggggggaacattcagtctgcttgtcatgggggctccaggcagtgaaggtgccaagctagccagagtgaggcatccttgtcctgtatctccatgtctgtcctgaggagtggtgagggctgagggtgccaccgaacttagggggagccccccagctgcgcatcagcaggagggaagcctggatgcacttctgtccctcacagggacccagaccagggtcctaggtgaacctggttctcacagctggttgcccacagggctgggacatctgtgctcaggaaacacctgcccccttcccccagccccatatggtgacctttccaggagtcaggaaattcagcctccacacctctgaccttctatctggtcacatccctgactataaaagcctccaacctagataagaatctgctttcctttaatggatatggagacaggtgtccatggccttccacggttattcaatagtggcagagccacattgagctgactcaagggctcaccttgcaccaaccccacacacctcatgcttctttcagagggcttcctccttcccaaggaaacagccgttctccccacactgtttccctgcccaactcctactcaccctccagagcccaggccaagggtccatgccgctgagctgccttacctgtgctctctgggtcagaagtcaatgcacttctttctctgtgacaataatggccctgaattgtggttggtccctcacgtctctgtccctagtgtacccagtctctggcatcactgtggcccagcccagagcctggcttgtacctggagggttgagtaacacattgcagaatggatactcccccaaaggaagcaacgaacatttgccgagcatgtgctgtacttggagcccattcctggcaacataggggccacagaggtgacagtctctgccctgacaggccatgtctacttccagcctagtaaccactttccaattatatccactaagaccattccttccactcccgtgagtcttaaatctggatcatagtttcgtttttttgtcacaaatccaaatagctctgatttggttaatttctgtttcttccaaaccagggattctcaaattcagtactgtggacattttaggccaaataacttttggtgtaggggactgtcctgtgaattgtaggatgctgggcagcatccctggcttctaaccactcaatgcccgtagcaacccccacccagttgtggcaaccaaaaatgtctctagacattgccaaatgtccccctgggcttaaaatcaccccgttatgaacaaccactgcttctcctgattcctctggtcctgaagcaggctttcttcccttttgcttcttgtccaataccacgttcttcttcactgaaaaatacccttggtgaggcgatgctcctcagtggctcagttggttgggcgtctgcctttggctcaggtcatgatcccagggtcctgggagtgagccttgcatcgagctccctgctcagccaggagcctgcttcctcctctcctccctgctcatgctctatctctgtctctgtttctgtctctctcaaataaaaaaataaaatctttaaaaaaaaaaaaaaggaagaagaaaaatgcccttggtcgcagaagtttacttcttctggctacttctctgagttagcaggaactttccttcacctgcactaaacacaatagagggagatgagagcaatcagcatgacttagacttttaaatggttatgaaaggggactacactcaggaaacacaaggactatacccacagagtgctcagagtgcagagttcctgctctcactcagccggggggcttgcccagggctgacacagctggcctggcctcgcctcttgcctggctccagacctgtctccgtgtgaagcgaggcttccaaccactgacttcccagtacaacctgaccatccaagaccaggccagggccccttctccctgggtgcatctggtcctggccactggtgtcttccttctgcctaaaccacctctctcctttgcccaggatccttctctttcttcttcccaaagaacctgacatcacccaatctgcttagcacccccaactctgcctttactttttcttggctccttttttgcctacaaggtgttctactcccatgtattctccccgagtacaactatggaaaaccccatatgctcagggacaggaactaggagtttgtccatctgtctgtacacctgtccacccctccacatagccaggcctttcccaatccctcatacttctgtcctccccccacaatccaattccgtgaacagtccccactgcctcttctccccatcatgtctccacctctgcccctggcttcactgaaactgccttccaggtcatcaaggaccatgtcatccctacgtgcaagtccacgtcgcccctctcttttgactgcccctccatttccagcctctcaacgccccctccagccaccccctccctcattgtctttcctgacacactccctgtcccctctgctgaaatcctgctgcttcttggaggcctgccctagatcagtcccttcccttactctcctcgggtatctccgcagtcccaaggggttattgccacctgcattggtctagatctccacccatctctccagagcttcagcggcccccagccacggcctcctgcacgtatttgctgcacacacagcagtcaccatgtaccatgcactgaccacgcgcgctcacaggctgaacacttgacaggggtcaactcatttagacttcacaaccatgcctcccagacccctttggatgggccttgagtattaaccctgcatcacagggtggtaaactgaggctcaggaaggaagtgactggcctgacggttaaagctttgtctggcgctaaaggcagcacttgtacccacagtgctctagcaggagtctccagcagccaggatcagactctcctcagacattggccctaggcatgttggcaacactttttccttgtctctgcccacaaattctccaaagcagtggtccctctgtggccgcaccccctcctcgttcccgaccgacacctgcacagcaaggccaggagacgtggggcagggagtgagtggcagctcccagctcaagaggactgttcacacccacagcattttatatttacagcaaattaagtcgttcacacctcattttacatttaaacattgctgaaattgggacacatcttctaggcagtggagcattgtggtttaatgaaatgtctgtgttgcctgtataactgcaatgtatattatggtatcatgtaatatctctcatcataacaagacttatctctcatcataacaagaccctaggtgggtgtctttacccacattttacagcctgggaaacagatcagacaatgtgttgctcaaagccacacagctcccacctgccacaaagtcagggaggaccagtggttgccactgctgttcatctaaacttcggggtgcaggggaaatggccggggtgctggcaggagggaggggcccggcactgccctagccaaggtcagctgggtgacagcagctctgggttgtccccaccttccagtactttgtcttcgacttccacgtctctcctgacgttatgttcgacaagatcatcaagatctcggtgagtggggagtagccctggcaggcagggccactagcttaaactgcacctttgtgtagacttaaaaaggggatccctctggatggaccaaccactaaaagccccattcccagccctatgccccgacacgcagccaggcaagtggggcacaggttgatttgggcctctgtcacctgtttagccaggtgcctctgtacagtgtacaacctactcacccgtacctggcagccaacaaaaatgagggaaagagggattaatgctgagcctcagcaagctgcccctgccctaccaaataccctccaagaagctgttccccagaaagacaggtggtgccaccatcagaccaccccatccctaccctcatggaaagcctcagccctgcctggcctgactggtggctggtggttctgcccggaaggtgattcactccaagaacctgctgcgaagtggtaccctagtggggtccttcaaaatggatgtgggaaccgtgtactcccagcctggtgagtagctgcgcgattcggtcagcatcagtacccacagctccgcgaatgtagcacatgccgtccttcccaccctgacagtcctggggcctagcctggccaggaccataaactgagtgtgaggccgttgggtgtgtggagtgatggggtgtccagtctgcacatggatgcggtgactacctgtgctcaggctgctggattcacaggagccctgcggggtgtgcggcattgcccccgtttacacttgagaggcctggggcctgaagaagcactggggcttccccagtcacgcagtccgttgggggtgaactcaggctgtatgactccagagcacccactgagccacactgtcctcaacacaaatgtgttgtagcagcctctgagggatgctgggctcactgagcaactatcaagggacccaggcctcctgaggatagccatgcagagctgtggctgaccagcagcaatgtgggtccccaggggccaacagtggatgaggctggtgagaaaatcccaagaggtggcccagagggtttatgaggcatgggacaggcggaggaagtcccctcagcctgcaagatgatggctaagcccatggccagctcaggcccatcctggcattgggccccacctcatgtcccaggagtgaacccaccactgaggatgcggtaacgactgcattaggctctttgacagtgacaatacagtttcacccggtgtcacacttgactgccacaaaacagtgaggtaggagacatcagcgttccttccccttttacagatgagataaatgaagccaagagaagttaagtggcttggaagtgccactgaactattaggttgaacaaattggcaatttcttgtggttcaacttagtagacacttggcctgtgcacactctgcgactaatactagggaatcggaggccaaacccaagctcatacacatgaacatcacaagctgcaagagatctgaaaacatagagtccagcatctccatatgacaaagaagcccagggttatgaggagacttgcccagcgcctcctgggaatagaacttggtctcccggctgccaggccaatgtctttcccactgacacacacacacacacacacacacgttgtaatccaagatggccctagtgaccattagcatcttagaggagtgggaaaggaagagggccagttttccatctggcacttcctaggaagcatgcccagctgcgggccatgggctggggtggaaccccagggctgagcagtgccccccccccagtaccggtggcagaggtttggagagacagcaaggagcctgacatggagatctgggcttctcagcagtagagtcctggagagaagccactgccactcagggagcacctgctaagcgccaggcactggggcagccacgctgtgctggcaggcttaaccctcactgccctctgtgggccacttcactccaagtcacaagaagaaagcaggcccagcaagcttacatagctggtccagggaatggaaaagaatgtgaacccaggaccaggtgggcccaaagcccaggctctccactgggcaacccactgccagacttgctgcttcttctgaatatctgttcctgagcctggtacccttcataggaacctgaagtcataagacccccacagctagggtactgatgtcttcactctgatggtctctggcttggtctgatcctccccgagagtccctcattgctgacctagccagggagtcattggaaatatgctgcccagggacacaggagtcctgggtgctactgggagccttgggtggtatcaatatcttgtggagctggaagggtttcctggggagaccagggcctgttatcaccctggcaggaccattttgcaccatcagatgcagcagcaggacactgctcactcactaattccctctgctggagataaggaggggttgtacaagtctacacccaccctttggtagatcacagaggaagtccggggtgcttgcaatctcctcagcccaaccaccttccctgacgggtgtctgagaagtttgagtatggggaggggtaagaaggaggcccttccaagctcaaagaacagcagccataaaggcaggagggtatgaacagggactccagtagtccagagaggagtaagcagctaggcccagagggagcacaagggtggggagggatgagtggagtgagccaggcagagctgaatcaggaggctccacggaccacactgaggtctataccccaagcaccggcgagcccctggcgtttgaaaggaagagccagggaaggggaacctctctgaaggttctatctatgtaggttgtctgcaggggtgagggcaggagagctgcaggggtttggagagttctctctcttcaaaatcacaccacacacccggacacaagaccttgccctggctgctcacccctctggggaccgctgtcttctcctggtcatcctgggaatcaggggcagaaaagatgctcagctccgcagctcctcaccctgccccagggtgacaggtgcagtctccactcctcacccctgcagagcaccagttccaccacaagtgggccatcctgtcagaccccgacgacatctccgctgggctgaagggctacgtgaagtgtgacatcgctgtggtgggcaagggggacaacatcaagacaccccacaaggccaacgagacagatgaggatgacattgaggggtgaggctcccatatacctccacccagcccctggagacctgacccagccctcccttctcccaaaaggagcccctggagtggacttggctcacagaccctaccccctgtacctcccactcccagacagctcagctcttccaagaagaaccaagggcagggctggccaaggcatccacagactctcctcccaggaggggaagatcagaggcaggacagggcaggagttcacagagattgtcctgggccctagggtatatagatgccagggcaggactggggtgcccacacctggcccccacagctctggctgtatgtgccggcaggaacttgctgctgcccgagggggtgcctgctgaacgccagtgggcccggttctacgtgaaaatttaccgagctgaggggctgccccgtatgaacaccagcctcatggccaatgtgaagaaggctttcattggtgagaacaaggacctggtcgacccctatgtgcaagtcttctttgctggccagaaggtattggggtgcaggatgcaggaggttgggtttggggtaacaagcagtagagctacagagtgattggaaagtgggggctggaggtggaggtgaggcaaaatcagaagccaggtgacatcgttgatccctgggtgcatttgaggagagtgggagatgaggggagctccagctgagaggggctggagctaggaccatgctggggaatcctttaagccatgggccttacgggatcctgcctgtctctgcatcctggagaccaagaactaagacgggagcactgaaagggaggaatctgagaggctggcgtgggggagagtgcctgctggatataagtgcacacatgcgttcatatacacccacatacacacgtcccacatgtgagcactgggtgttagatgcaactgatgaatcaccaacctctacctctgaaactagtaatacgctgtgtaacacccagtgctcattgcatcccgtgccctccttaatgcccatcgcccagctacatctccccacccctcccctccagcaaccctcagtttgtttcctatgattaagagtctctaaaaaaataaaaagagtctcttatggtttgtctccctctctgatttcgtcttgttttatttttcccctccttcccttatgatcctctattttgtttctttaattccacatatgaatgagatcatatggtaattgtctttctctgacttatttcacttagcacaataccctctagttccatccatgtcattgtaaatggcaagatttctttttccattatgtgtatacacacacacacacacacacacatacatacaccacatcttctttatccattcatctgttgatggacattgggtctttttccatggtttggatattgtggctattactgctacaaacattgaggtgcaggtgccccctaaattgaatttaaataaaaaatttgaatacatatatatatatacaccacacacatacacatacacacgtgactacacacatatacacataccacatgcacacacccataggtacacatgcatacacacttcctacacatatatatatgcatacattcgtagtccacatacgtagcacaacacatacacacacaacccacatgcatacacacatgtgcgcataagccaccacacatacacgtacacatgcacttgcacatacatgcatggatacacatgcacatacacacaccacacacatgtacatgtgcaggtgctcacacacacacacacacacacaaacacacacaccctaaccctcattccctcccaccagggcaagacttcagtgcagaaaagtagctacgagcccctctggaatgagcaggtcatctttacagacctgttccccccactctgcaagcgcatgaaggtgcagatccgagactcagacaaggtcaacgatgtggccatcggcacccacttcattgacctgcgcaagatttccaatgacggagacaaaggttagcaacaggagactgcattaggggcaaggggaccgaagggaaggggtaaatgggactcccccctcaccacacctccaccatctccacctcctccagaaaggcaccggacatagtgaggcttggtcagcagcccccacctcaaagggtggacagtcatggctcaggtctgcacagggttgacagggcctacctgaaccaggttgcctgggtttgaacccgcacagttagtggctgtgtgatctttgaatttgttttctcatctgtgaaatggaaataataattatgtgtgtttcacatatatggatactgctgccacagtccctatctatgggcttgtggggctcaccccttctaggacccaggcaccaggtaccagagcaagagaagaatccattcctgtcctcatggtgctcactggggactagaaaggtggatgtgctaccgaatgttcgaaacctaaggccaaagacgcagaaggccacatattacatgactccatttctatgaaatgtccagaacggtcaaatccatggagagagaatatagactagtgattccaggaggcaggagagggacccggactaactaccagtaggtacagggtttctcatgagggggatggaagtgtcctggaaacaggtgatgctcgtacaacatactgaatatactaaaaaccaccaaaatgcatgttttaaaatggtgaattttatattatgtgaagtatatcttgatttttttaaatgccatgatttttttctaaaccaagcagaacaaaagccaaacaaacaaagctcatacagcagatcagccccatgttacccagagacaaattccaacagcaggagaagttaccggggcctaggaactgggccggcttcgtggagaaagcattacacaggcggacagagggaggatgtttggagaggaggggaggggtccacgtgagcagggtggaagacctggtgagatgcgggtctgcaccggccaccaggggccagaaggccaggctggggagtgtgagaggagctggcgtctgtaggcagccccggctccagctcccaggaagcagggagcctgacccaaggaagggctctgtgcgagtgaggaggctgcccaggccgcccatgcacggcaggggtgagctcttcctagggcctcctgtcagcctgcctccagtgattcaccgagcaagacacggggtcctcggctcggcagccaggaggtgcaagcccgacaccctaaaagaggctccaccagccccatgagcccgtcgtccctctccccgtggcccacaggcttcctgcccacgctgggcccggcctgggtgaacatgtacggctccacccgcaactacacgctgctggacgagcaccaggacctgaatgagggcctgggcgagggcgtgtcgttccgcgcccgcctcatgctgggcctggctgtggagatcctggacacctccaaccccgagctcaccagctccacggaggtacaggtggagcaggccacgcccgtctcggaggtgaggacccagggggcgggctgtcctccagggcccctggctcagccctcttccctccacgggaccctaggcctgggctcggcctgttgctgccgtctgcctcagagggcaagaccccatgacaaagcctccttccccaggaagcaggatcccacactctgcccccaataccccgaggggacctccattccctcccactgcctgtgccggcactctgcctggaggtcccaggtctctgctctgttcctgaccatggttgtccttgtctagggatatgcaggccggaggtcaaaggatttaggccttcagggtctgggctgcttagctgcccagcgggatgggatgtctgcccccatctgtctgtaagccagtaggaggaggcctggctccaggcctgacatccctgctgaggtttggggatggtttgaaccaccttccccacagagctgcacaggaaaaatggaagaattctttctatttggagccttcctagaggcctcaatgatcgaccggaaaaacggagacaagccaatcacctttgaggtcaccataggtgagtgccaggctcagagggatcttcaggcctgggggctgctcggtggtaacagctaggaagggaagctttgaccaatttccttcacgtgtcctcaaacacccacacagcacacagtgttcacacgactgtgcacacgtgcccacagggtgccttagctccacagggtaaagctgtgtttgggacatgggggagaaagcagccttccctgcagcagggaagggggagagagtaggaatccaggccatgtcctaggctggcccttgagtccagtggtcatcagggctcctagccaggtcattgctgggggtgggggacacagacaccttcctctggccagtgttctgttgtgtccaagctggctcaaactcctggcaccttccccaccccctgccttcccacttccctcccacaaacacaaagcagcacccaaatcagagggcaggagtatgggggtaggagagaaggattctaggccctctagtgccccattctgcctccaggtaactatgggaatgaagttgatggcctgtcgaggccccagcgggctcggcttcggaaggagcctggggacgaagaagaggtcgatctgatccagaactcaagtgatgatgaagctgatgaaggtggggacctggcctccgtgtcctccacccctcccatgcggccccagatcacagacaggtgagtcaggaggatggagggtcctgagaggccctacctactgcctcccatcgtctcatggcctggacctcccacctcccacctccctgggttccggccctcaacctcccacctcctccccctcaggaactacttccatctaccctacctggagcgcaagccctgcatctacatgaagagctggtggcccgaccagcgccgccgcctctacaatgccaacattatggatcgcattgcagacaagctggtcagggccaggcggggggagggagggagcaggggaaggcaggggtggggggtgcttcagagggccttgcccagcctggaagcctcccctgcaacacacaaggcagtctgcccagcaggaaaagccccagcgttacctctggtcctgtccctgctctcatgccccaggagtgggtggagggcccaagggctacatagaatggagtctgggaatcctggtccatcccatcctggtgttccctggaggaggctggcaacccctctgtctctggcctgcaccgcacccccatccaccatctagtcctgacctctgcccggccccagcgaatccactggaaccacagacccgtagcccagaggtggcttcttccttcaggcagagacagagcctggggcactggtagtttctgtatgatgtcaagacctgggcagggtggggcatggaactagtgaggggtcccctgatgaatggggggagacttctggggagactgaggcagggggctgtgggtcagcatgcaccctcactcctggtctgcaggaagaaggcctgaatgacgtgcaggagatgatcaagactgagaagtcttaccctgagcgtcgcctccggggtgtcctggaggagctcagctgtggctgctagtgagaggaaggggtcggggggcgaaggactggaagtggggggctgagcaagggaggaagtgtctgcaggcttgctggccggtggcctccgctgagcactactcccttgatcccccagccgcttcctctccctcgccgacaaggaccagggccactcatcccgcaccaggctggaccgggagcgcctcaagtcctgcatgcgggagctggtgagaacatgctggaccacacaggggatcaagggagggtgcccaaggccaagggaacagctgtctctaaggtcacagccaccagggccagctcccttcgtcatgcagtgtggcctgagcccctcaccaccccaaccctccaacccccgcaggaaagcatgggacagcaggccaagaccctgcgggctcaggtgaagaagcacacggtgcgggacaagctgaggctatgccagaatttcctgcagaagctgcgcttcctggcagatgaggtgcgccccctgttatcgtgcagagagggggtgcccagccctcaaaccagagtgactggagtggggaggtggttgctgcacaggaagaggctggacgggaccacctaggaggcccctctggttctgacagcctttgggggacagaggagaacaagccattcatcctgtcctgtgttcttcccatgcaatttgtgggaggtgaagaagacccagctttggggtcctcccctctgcaggcccaggcctggccctctgggcccagagggtcagtcaggctctggggccctagccccatggaggacccctcccttagcagccccctcttgcctgcccccagccccagcacagcatccccgatgtcttcatctggatgatgagcaataacaagcgcattgcctacgcccgggtgccctccaaggacctgctcttctccatcgttgaggaggagctgggaaaggactgcgccaaggtcaagacgctcttcctcaaggtacaaaaggggaacgagtcttgggaatgaggttggggcccaagcttggcatctggcttcttccaagggatcagcctcctcttggagggagtgccctcccccccatagcagctgctcacagcagagctggagagagaataggaaggggggacgagggccagatagcactgtcctgcccatccccctccgttctgttcccaccatggtgaggtggctgtggagggacaagggcagctctgaatgaggcctttgccagggccccccacttgtccctcaccccctggacccaacagctgaccacaacccctcccccagctgccaggcaagcggggcttcggctcagcaggctggacggtgcaggccaagctggagctctacctgtggctgggcctcagcaagcagcgcaaggacttcctgtgcgggctgccctgtggcttcgaggaggtcaaggcagcccagggcctgggcctgcactccttcccacccatcagcctggtctacaccagtgagtgaggccccctcatccaggccgggcctggctgccagccccgggacatgtgccagcaaatcctgctgtcatcagccttcccacacccccgggtcccccagccccctgcccacacctgctgcagcgcagtccgggagggcgccagaggggctgcccagatgtatgtacacggagcctcagcttgttcttccccacagagaagcaggccttccagctccgagcccacatgtaccaggctcgcagcctctttgctgctgacagcagtggcctctcagaccccttcgcccgcgtcttcttcatcaaccagagtcagtgcacagaggtgagggctcaggggagaagggaggggctctggctcggggagtactgggaagcccttgagggtgtgggacccagaaaacagatcggccagcaccccagatccttagagaacagccttgcaggtatctgtgggcccagaacatactggtaaaggctttaaattgtgattacgtttgacacagaagaaaggaaaggaaagacatggtggggtgggggggcttgggagccagcctcatgtaggccttcattttaagcttttgggaagagtcagggaacatgaccctcctgtccccggagtccctggaagtcacagtgatttgggtgactcctgctcatgtacgtgcccacacgccaccacctattacccatatcccccctgtcccacgctgcaggtgctgaatgagaccctgtgccccacctgggaccagatgctggtatttgacaacctggagctttatggtgaagcccatgagttgagggatgatccccctatcattgtcatcgagatctatgaccaggacgccatggtatggacaggctcaggcccagggatctatgccttcatctctgcattccacctgccttgagagccacctccccagcacagccccagggctcctcagccagggtgcttgctgggaagctgggagtgggggtgggggctgctgaccagaccctccagcagaccttcctcctcctgccctgttactgcagcctgaccccttcccgatcctgggggcctctgggatctcaggaaacagctaggccagagtgtccacacatcctgccacagataggcccagctcaggcccagagtcatcaggacatgtgccagcaagtcctgctgtcatcagccttcccacacccccgggtcccccaaccccctgcccacacctgctgcagtcagtaacagcttcacagctctccatggaaactctggagtagagaagcaaaggattgagatgacccttccagagctggggggccgcccctccagctactgggatactctgagagctctggactagacgtaggaagatttcattgctagtcctgagtcctgcatctgccattcactgccagcatggccttgagcaggtctgtgatgggccccaaggcttggtcttccccatctgtaggatgaggtgatcacacctgccccttagctcctgaggctgtggtgaggactgaacgagatcccaggtgtgaagaatatccatagtaaactcaagcgctgggaggccacctgggttatttgtcatgtcagggcaaagccgacttcatgggccggacctttgccaagcccctggtgaagatggccgacgaggcgtactgcccaccccgcttcccaccccagctcgagtactaccaaatctacagaggcaatgccacggctggggatctgctggctgccttcgagctgctgcaggtggggccacagggaagggcactggggccgggagctgccctccccatcctgccgtgaggccagtttcaccaaaactgtggtgctgcagtgtggttctcggggacctggggcattagccttccctggctccccatagcacctgacaaatacctcatggggaaggagagtgtgacactatgactcccatcccccagattgggccagcagggaaggcagacctgccacccatcaacggccctgtggacatggaccgaggtcccatcatgcccgtgcctgtgggcatccggcccgtgctcagcaaataccgaatcgaggtgcgtgagggctcagtggggatcctccggtccctgccctggacaggccctgctgcgttctggcttcctcgccccttcactctcctcccatcaaggctcacgtcacacactccactgcgggcatcaggaggtctccagcaacctcagacactcctcatttttcagacaaggagactgaaggcctcgggagggaagtgacgtgtccaagtcacacccaggctcctacccttgcagtgcctgactgttctgccccaagtccagaaccttccccagccctcctgtcagtgtccccatgcccacccgaagccccgaagccccttgaggacactggcctctcatcggttcccctggccctgcctctcctaactcactgcccaccctcaatgggccccactgactgaggggctctcctctcccccccgccccaggtgctcttctggggcctgagagacctgaagcgggtgaacctggcccaggtggaccggccgcgggtggacatcgagtgtgcaggaaagggagtgcagtcgtccctgatccacaattacaagaagaaccccaacttcaacaccctcgtcaagtggtttgaagtggtgggtgcaggccccgggcagagccagacagaactgggtgtagcttgtatggccggggtgggtgtctcctctgttccctccttgatcccaggatgcacttggtcaacaccccaggacctcccagaaaacgagctgttgcacccgcccctgaacatccgagtggtggactgccgggccttcggccgctacaccctggtgggctcccatgccgtcagcgctctgcggcgattcatctacaggcccccagaccgctcagcccccaactggaacaccacaggtatggccacaccccgaagcccaggcctggctccatcggcccacaggagcagctcctgcccacagtccaggcctcgaggccgccagctggctacccaggggcctccctgagtgggcatgagggaggccaggggacgccccatcctgggggccaagctacctttggctgcccatcactctggagcagaaagagccagagccagacacgttcttcaagggccggagggcagatggcttcctctgctgctctatggatgaggccaggcctcccttctagcctccctcccggcccagactctactgtttgactccacagcagctcagccttctctctggctcattttctccctctccttatgcctatcttttctctctcaactgccctgtccctccctcttccctcagaaagctccaggatcagctttaggcccctggtccttctgaccacctctgattctcactctcattcttgttcttccctgtctgtctgcttgtctgtccgtctctctgtacagtcaggctcctccggggtggccgtgtgctgtgcaatgggggcccctcctctcaccccacaggggaagtcgtggtgaacatggagccagaggtgcctgtcaagaagctggagaccatggtgaagctggacgcggtaaggcgcgtaacgtcagccccacgctagctgggcacctgtgacgcttcgcaggagcagggccgcctcctttggcatgtcatggtcgagggctaagcctgcctacatctgcaagcagtccatcctagctctgttgcacccgcccctgagtgcaagactgtcagttctgcatgttctttccagagactgcctggtttttcatcccagcaattcacaaacaagcctccctaggcccgggctggggagagatttctgggtggaagctccttatgcctcttggtttggacactagggccatttatctgccagagagacacctgtcatctgggatttagatgcagagctggtgtctgcagggcagggtgggccagatgtgggcttcctccctgccacattctctccactccactcctgacctcaagtcttttacacagctggggcacctcccagcttctgaggtctgaactcagtctgaaatgaccttcccttggctcacagtccttgaccccggagggtcccgggcagttggctgagttagcagggggcatgggtctgaggaaaggggagcagatgagggacggggctggttcacagccctaccatggcactgccaggaaagcccactgctgcagggctatgcctggagatgccaggccccctcagctcccagcatcctgaacttctccctgtgggctcctcctgaggccaggggagagccccctaacttcagaccatcggtgaaaaagatagaggacagcatgaacctgagcttccccctcatcaccccggccctggactctggtggggatgttttcaccagggtcctcttcagctatgcagttatctgtgcatccattgaagttttcaggctcttgccctagtaaggggggacagtagagtggcagttgaccttgtctagctagcattaatgagttcctgctgcatacgggtcagcttccctgtccaaccctgaatgcccattgaaaacatctgggaagttttcagccatgcaggtgcctggcccccacattcagactcaggagagacctggaactgatcatttgtaaccaccacccccgccccccgccgtgagtctatcacgcagtcagggtggagaaccaccaccctcaaagggctgttgtggggggacgcctgggtggctcagcggtttagtgcctgcctttagcccagggtatgatcctggagacctgggatcgagtcccacatcgggctccctgcatggagcctgcttctccctctgcctgtgtctctgcctctctttctctctatatttctcatgaataaataaataaaaatattttaaaaagaaaaaaaaaaaaaagaagggctgtggggaaacatctatgaagcagacctcttgcaggttcaccaggcagtgtgctcttgtcagcgctaagtccacagagcacaggggctcccacagtgaacatcaccgcatgaactccctctctgctctcgctttatcctctcctcttctctctttcccctcgtctcctctcctctcctctcctggctgggtggctgcctaccacttcaggcccctggtggctaattctgtccccatctctttggttcccctccacagacttctgatgctgtcatcaaggtggatgtggtgagtgtggggccatctgggggctttgggctttgcagtggcagaggatatcaaaccaagaggccctgcatcagggactgagccactccccaggccctggatgctcggggtcagtaccttcctccaaagaggcagagggagagaaccattcaggcagcaaagccctcgagagacagttgtgttctggccagcagctcaaactggcaagtcatgaccctctctgggcttggtaccttcctccacaaaacagggccctttgacactggtgacctcaaggagcctcatggagtctagggcttcccagaagtaaatagttaaaatagatggggaacccttggatggccagggctcagagaatgtccagggagcagggctgtatgcaggactctggacctggccaaccctccaggctgacgaggagaaggagaagaaaaagaagaagaagggcaacgcagaagagccagaggaagaggagccagatgagagcatgctggactggtggtccaagtactttgcttccatcgataccatgaaggaggtgaggccttgggcttgggctggggagctgagaaggaatagggctgggggagttgaccccaactccacatcggcccctctttcccattccccaccagagccagttcccccactccattaacatgagctgggaacagacttgtctcacatccttgaagttccagctcaggacccaccttttccgagatggcggtccagtctaccttctctgcctaggctttctctgtcttcactcatcttcactcacttcactcacaccacaaacacctcctgagtatatgtgatgagtcagacaccatcctaggtactgtggaggccaaagataagtccataacctgccctaaggagccctcatggacatgtcagctgacatagtgtgatgacaaaggcagatcaatgcctgggggagtcagagaaggcttcacagggaaggtgacctttgaggaagaggagaaacacgtgcagaggccaaaagggagcaatgatttcttagtaggacttgcacctctttatattgctttgttctacatatctcagccatcgtggctatggaatgttcttcccctactggatgcatgcagcttcttcttcctgaggctgatcgcacattccagaaactgcatttctcttcttccacctctgactctctccacccagatcagggcattccctgccttaccgactgaccaggaggggcttgtgcctcagtaggacctgagctgatccagacaccctctttccccaggtcctttctgtgacccaggctatgtgtgatgtttactttccacattaggttagccggctaagctgctgtagcaagttagagtagtgtgaacaagaccgaaacttctttctttctcacatgtctcagagagtggtgttaggctgatagggggacataatggcggcaagccccaagaccctgccgcttgttgctggcatctgtgtggttagaggtggctcagcctcaggtcctaataccagagcacaggaaggggtaaaatagaagaagaggaagcgtactccttccctcttgagggcccaacctggaggttgcacataccatttccactcatgttggccagaatctagactccatatctacacttagctgcaaaggaggctgagaaatgtaatctttagctacatgcctgtgtgtccagaaaagcttctaaagagcaggaggttgccttgagggtgggggggttccctagtcgtaccttctcccaccatcatctcctggattcaagctgcccaggctggagctccaaggggctgcctattgtctcatctctactcctgtaatttgcacaggttgccaccaagtggcgccttaatggaaaccccgaggtttggtttccagcaggtagggtggactgtggggaaagaacattaaaacacattttctgattccgttatacttgtctacatttaaaaaagtataataccactaagaatcaacattaaaaggcattttatttttaaatgatatacaatttaaagaatcataagctcctgagtagttaggcatatcgtacacatcataaactttttttaacccactttacatagagcacatgatgagtttgaaccccaatcagaaagtgtttctgtttcctttttttttttttttaaagattttatttgttcatttgagagagagagagagcatgagccaggggtgaagggggcatagggggaggggcagagggagaaggagaagcagaatccatactaagccgggagccctatgcagcacttgatcccaggaccccggggccatgacctaagtcaagggcagacgcttaaccaactgagccacacaggtgtcccaaaagagtttgtttctaagtccttaagactagtctcagaccgcagtgtggggtcaaaagacccctccccaagaagcccaccttcccttcccttcacctcatcttttggcagcaacttcggcagcaagaggtctcaggcactgacttggaggagaaagaggaggtggacaacaccgagggtgagcctgggacctgggtctctgcctcccctccttccccagagggctggctctcctgcccaccacgccactatcatcagtagccgcggcagctgcaggcagctatcaccagccatctctgggcaccaagagcgggcgtagggcctcaactagggtggcttgtgcttgaaccagttcagcagccacagacatttagagccacggaacatcagagctggaagggagctcagagctccagcatcttccagaccctttccatggaacactgatgataatgggtcttccaaggggaaaagaggattctttggtcaaatggattaaaccggtctttaggcacaggacttcccagtcctttaatatacaaacgtgatgataagtctctaaatggaagttacaatgtaaaagatttcccagcttatctgaccacaatgtacccttgctcctaaaacattccaagaacatctacagctggtgtcccactgaacgtagtttgggaaatgctgatatggaacagccctcttaatgtgacagacaagtagactgaggccagagaggagagtgagctgcacggtgctgactcaagacccatgttccttctgtgctctaccctgccagagggcgtgacagcagtcttcatacactgtcccagtgtggctttattggtgccctgcccccgtgtgaggcaggcatgccagggagcactgtctgcagcttacaaatgagcacacagagccctgagaaattaaattaacaaagtaaattagcagcggatctggctctccaaccccaaacttcctgctccatcacttctgccccaaactgacctgggcctccttttctggttctggccaggcctgaagggaccgatgaaggtcaaggagaaggcaaaggcagcaaaggaagagaagaaaaagagaacccagggccccggcgccggccaggggtctgaagtccctgagaagaagaaacccaagattgatgagctgaaggtgagggtctgggaacagaccgaccaggagcgtggggtcatgcctggggcaggaagtggcaggtggggtgagatggaggccagtggtcatggcctgtccccccgacggcccggccctgctcaggtgtactccaaggagctggagtccgagttcgacaactttgaggactggctgcacactttcaacctgctgcggggcaagacgggagatgatgaggacggctccactgaggaggagcgcatcgtgggcaggttcaaggtcaggcgaaggccctgaaccctgagcctccctcccaccagctcttctccccaccccaagccccaagccccaagcccagggctgacagtcaagtggagctgttagctatactgattagcaaaatacgaaaatatttctgtgctgattataaaagagcatctgccctgagtgtcccacctccaacattgccctggccactccctccagaacccccagacctccctctgacgcaagtggctgaagggttaggaccctgagcagcagggtgctgttttgaatgcacccctgccatgcctatgggaactgaactgcaccctgactgccttgccttgccccagggctccctctgcgtgtacaaagtgccactcccagaggatgtgtcccgggaagccggctacgaccccacctatggcatgttccagggcattcccagtaatgaccccatcaatgtgctggtccgagtctatgtggtcagggtaagactcccccctcagatctctccccacagtctcccaggccccttatgcaggaggagctaaagcagtggcaaagtgacagccccaactgagagacaccaggaaggtcatctgatctagttcccacctttttcttttttaagattttatttatttatttgagagagagagaaggaaagggagagagcatgagtagaggggggagcagagggggaaggagaagcaggcttccctccagagcagggagacccatgcggggctcaaggccgggaccctgggatcatgacctgggccgtagccagcggcttaacccactgagccacccaggcgcctcagttcccaccttttatagaggaggaagccaagacctgagacaggcagtgtgacttgcccagggtcccgcagcaagtctcccgtctctggttcagcgctcccaccctttgccatcatgggaccatcagggagggcgcgagggcactggaaggtgagctgggtgtgtggggagcctgctcaggagcacctgcccccatcccaggccacggacctgcaccccgcagacatcaacggcaaagcagacccctacatcgccatccggctgggcaagacagacatccgggacaaggagaactacatctctaagcagctcaaccctgtctttgggaagtaagaccccctggcgtcccacatgccgcccctcctgcccaccccgcttccccagccggccctccacccaccccacccagccccgcccttccgccttcctgaccccacccctaccccgccaggtcctttgacattgaggcctccttccccatggaatccatgctgacggtggccgtgtacgactgggacctggtcggcaccgacgacctcattggggaaaccaagattgacctggaaaaccgcttctacagcaagcaccgcgccacctgcggcatcgcccagacctactccatgtgcgtggggcggagcggagacgggggcggggcgagggcggggagggagcggggtggggcggagacgggggcggagacgggggcggaggtgaggcggggcgagggcagggatggggcggggcggggacaggggtggggcggggcggagacggggcggggcggggcggagacggggcggggcggaggcggggcggagatggagggggcaggagggggtgggtnnnnnnnnnngaatattaaacacttctgatattcacaaaggtctcaaatcacaaattactctgtaggataatatgcaagttcgttactatcaaatgactttccaaatctaagatacggaacaaacaaaggcggggcaaaacggagacggggcggggcggaggcggggcggagatggagggggcaggagggggtgggtgggatggggaggacgggggcgggcggggcggagcgggcacgagggggcgggccgaggacggagatgggcggggcgagggcggggcacgactggggcggggccggaggtggggccgggccgggcctgggcgcttctgcagtgtcttgtctctgaaaacaagattcagggattgtgatttgggaaggtggctctattatggtttctgccccaggccaggcctccttccatgggttgtaagacgaggcgagagccagaggattccgggccagaggaggcagggcaaggagagaacagtgggctgggaggagaggtggcgctgctatgcaaaatccactggggacctggccagcctctgcactgacaggctgtgtgaatctggtcacatccctaacctctctcgttatcagtgtcttcatggaagtctttgaagtaccggaggaaagggcatagttgggaatgggctgggctgcattgggggacgctgaaagctcatccttgagacactgggcatatgaggctggggcctggggtaggagggagcagcccccagcaaccctatctcaggtggggcccacatgctgactcaaggcagcagccaatttaagggaactggttggaaccagttaccgcctggggatgggcccagccccaccctgagcccgacgaagcctgtgtgcccctcccacagacatggctacaatatctggcgggaccccatgaagcccagccagattctgacccgtctctgcaaggagggcaaagtggatggcccccactttgggccccccgggagagtgaaagtgtccaaccgcgtcttcactgggccctccgagatcgaggacgagaatggtaatagggcactggacacagccacggggcctcagaggccaagaggaacccacacatccctggaggaggatcttgaggtctagactggagtctctttagaccctctgcccatcagcctagagtcccattcctgtctgcccagcctctgcccttccaccccatcctacagggcacctgcccacttgttgtcttctttctccatctcagaattcctgtggggtaggatggttctccccattctgcagagaaagagaaagacactgagacccaaagtgtttcagtgacttgcccaaggtcacatggcttttcagaggcagaatgagaggtgggcccagatccctctgactccaagccctgggctctcaccactcctttgcccacatggcacttcccagagaatagagaggcatgtgtgctgtggaacccttgctggccaccttcaggatgctgggccaagaggtggattcttgccgtcctcgccctcacagcctagcaggattctctagtcaggtttcccaggcagagcaaacccaaaaacccagtctctctgggccctgtggggcagctgagaacttgggcaagccaactgtccccctgtgcctcagtttccccaatagtaaaaaggagatggggtggacaggtgatggctcaggggcctctttgtgcccctgagtctagcccagcacaggtttcttattctgctgaggctgtgtgtgcaactgacccaccggcacccgcaggtcagaggaagcccacagaagagcacgtggcactgtctgccctaaggcactgggaggacatcccccgtgtgggctgccgcctcgtgcctgaacatgtggagactcggccgctgctcaaccctgacaagccaggcatcgagcaggtgacacttacctggcttagatctgaggttctttggtatctgggatcagggtgtccccacctgagcccataaaaatggatcctcatactgtttgccacatccccaaaagcctggcaggcacttccccaccatggcccttcgcagcaactctggtggcatgcgtctttgctctaagtgagagtcacatcagctcaggtgcagccctcaggggtctcccttagaagctgtgattggctattggtgatgtcataggaactctggcatccaaggatgaaaattgatgaactgggtcctgagggaacaaaggttggtggggggtagctggcattccggggcagggggagtccactgggagacctgccatgccccctcttccgcagggccgcctggagctgtgggtggatatgttccccatggacatgccagcacccggcacaccactggacatctcccctcggaagcccaagaagtgagcttctggggcccagcaccattgccttcccctccctacccctcccacctctccatgaccttccttcctgtaggggccccagactcagatcacccacatcgccgtggtcagtggtgcttcccctgtggccttgtggggggaacatagcaacccatggagagagcagtgggggctgccctgggtgggtccccttttccgaggcggagccacacccccagtgtgccctgggtgaggcgtgaggagatgtgcactcatcagcaccgcccagtggactttcatcctcccagcggcactaccccggagcctgctctgttggccccactccaggctgtcattaactctgccaggttttatttaaaacccctgtggaggagataggcaggagtgagtgcccagaaaggggttggggaggcggggggtagagtggaaagaggaccagaggcaaacagcctgcctctcccacttggccctggccaggtcacacggcctcccgggtcctcggctttcccatctgtaaagtggcagaatggcgttgctgccagttctgacacctgcggtgcctggaaccagggcctggatagggaagtgccacaggtcccacactcagagcggccccatgtttatttcaagatgacaatatctaaattcttaatttttaaaaagattttatttatttactcaatagaggtcgtgagcacacaagcagggggaggggcagagggagagggagaagcagactccccactgagcagggagccctatgtggggcttgatctcagggtcctgggatcatgacctgagccgaaagcagaggcttaactgactgagccacccagtgcccctaaattcttaatttttaaataaggggtcccacatttccattttgtactgggtcctgcaaattagcaaattctgcctggaattgcctccaggtctgtcatgagtgtgctgtcccagggctggccactagtggacacttcaccccatggtgtaatcggggactcagggtaaacttgggaatgccatggaccacatgccaagtaacgtgggggggaggtgactcaaccacactccgaatggttgaaatgtaaccaccgatttataataacaagtacacttcaagtggaaaaatcctcttcaaggacaaagacataaaggaaaccagattccttgggagtccactgccagctgctgggcttaaatacacatttgtgttagaactggagtgccttctggcctctggagaccgagattgagctcagccaccccccaatagcggccctgcccctccggagctgggtcagcctccctgtctaggggtgtgctctgggtcctggcgtgtcagccagacaggcttcccctgggccctcctgtctccctcgcccagggccccaacatccccctgttccctcagctccccctccttgcccccttccctgaatcgtctctctccaccccaatctgggccaggacctcatgctcaccttgagtccccaggactccccttggtgacctgccctatatatgcccaagaccctgggacagcccctacccccagattgtgagccagcctctcccctgcccaggtacgagctccgggtcatcgtgtggaacacggacgaggtggtcctggaggacgatgacttctttactggggagaagtccagcgacatttttgtgcgggggtgggtgagggcccctgacagggttggggggccctgggctgggagagcccacctttctgggggcaggagaagagggaaggggccccctgcaggtggccacaggtctggagctgatggcccctggcaggtggctgaagggccagcaggaggacaagcaggacacggatgtccactatcactccctcaccggcgagggcaacttcaactggcgctacctgttccccttcgactatctggccgccgaggaaaagattgtcatctccaagaaggagtccatgttctcctgggacgagacggagtacaagatccccgcgcggctcaccttgcagatctgggacgccgaccacttctccgcggacgatttcctgggtgcagggctggggaacggagggggcgggcagggggagcccaccctgggggcgggggatccaccgggcccggcctgtcagagctgactccagggctgccacaggggccatcgagctggacctgaaccggttcccccggggcgcgaagacagccaagcagtgcaccatggagatggccacgggggaggtggacgtgcccctggtttccatcttcaagcagaagcgcgtcaaaggctggtggccgctcctggcccgcgatgagaatgatgagttcgagctcacggtggggaccgccactgcttgggcagagggcaggcctgggcccggctagggcgcggagggtcccggcgcctggcctgagcgccgagatccttctgttctttctgcagggcaaggtggaggcagagttgcatctcctgacagccgaggaggcagagaagaaccccgtgggcctggcccgcaatgaacctgaccccctagagaaacccaagtgagtgtgctgccggcctggcccccctgccacgctgatccctggggccactggaacaggaaggggcagcaagaaccttctggacttctcgctcccgctctgcaagcacctctgtgttctctatctctctctgggtgggggagcctcttcccctgtctgctccccaccggaatccacccctccctctgaaccaaagcacgggctactttttcaggaaagcagcccctctcccagggaaggcccgtgtcacagagctgaatgcttttcctagttttagcccacaccgctgcggtggtggaatgtggggccccaggcagccctgagggccggggaggtgaccagaggtgcacacgctcagcccaaggtcgccccaacccgttgcgaggcccctgccatatcctgagccttcttcatcctctgtgtcctttctccacgctgcctctgccctcttgctgctctaggcggccagacacgagcttcatctggttcttgaaccctctcaagtctgcccgctacttcttgtggcacacataccgctggctgctcctcaaactgctgctgctcatgctgctgctcctcctcctcgccctcttcctctactctgtgcccggctacctggtcaagaagatcctgggggcctgagcctggcttcctcctggctctggtactcctcacttcttcctctggacctagggctgatgagctgggcagcatgtggcacacacacacgtgcacacgggatgccccccccccccacacacacacgtgtacacgtgcacacacggcaattttcaaacaaagcaacctgcctaaggtcacctagctgattagagctaagacccagcctaggttttcaagttgccaacccaggatccttggcttgacgctacttgctgtccttgtgacaggctgactctaacccagtgctgttggcagaaagcagttgacatgtggacaggggatggggaagggtttggctgggagtagccagcaagacctcactggttcccaccagcccccatctcccaacccagagccgttttctgtcgtgcaggccagtaaggaaccctgtccagttcccatagcttagcggccaacatctgctgaccaggcaatatctgctgagcagctgggggcctagcagagcatgtgcactttgtctccttcccctttaccaaccccagaggcagagtccactattaaccccactgtgtaagtacagaaactgaggctcaaacgggagcctgacttgctcatcaccaccaggcctggaaaccaggtgccctgagtgggagccccactgtgccctgagcctggctctggagggcatggtctgtgtcctctgcggggccagtgggacaggagcttgaaaaaaaatctattcagtacttgaattttatatcttgacatcttataaaacctactgtctttgtaaacatgaacaccagaggggattgcttagcaagcacctcttggccggaaggctgtgcagaagatagagcagcaaggggcgtgcatcccacggaggctcctcagaccctgggcagggtgcggtgggcatagatgctcatgttcatcacagagggggagaggctgagagacactggtttcacagagacaacacggggcggccccagagcacccacggggagctgctgaacagaggagcttcccagggatcagcactgtgggcagtgcggcggctgcctctcagtagtgaacagccacggccaccagtgtccaggtggaggctggacggctgcccagctgccagaaagccctctagggccttgggaggagaccaagggtgccagagggtcccacaaagagcctaaacctggtgcttaagaaaggggtccacacccggttccagcactctcactacttttggaacccaggctgtgacagggcatgttgggggtcttgaagagccgagggcatggggtgccctgggagaggcccattgcctgaccgcatcccctccccacccccagccggcctgacaccgcctttgtctggttcctcaaccccctcaagtccatcaagtacctcatctgcacgcgatacaagtggctcatcatcaagatcgtgctggcgctgctggggctgcttatgcttgccctcttcctctacagcctccccggctacatggtcaagaagctcctcggggcctgaagccccacggcctggctgccgctcctctcctgggcctgggcctttgtccctcctctcgtgtggactttccagtctccctggggagcctgggaagcccagtgtccacccttgtggcctcaagtcccggaagcctgcctcctgcttgctgggctggcgaccccatccctctcctcctccaccccaagcctgttgctggccctgtcccactcagctggtccccgcctggtgggtgagaagggtgggcaggagtgggggtctgtcccttaagccaccccagatcctcccttaggttttcccgtggaggagtcaaggtttaatagaattaactgagaatcctgtcatgggccagtgcccagagctataaaaaaagaatgaataagcaaaaagcatcaccctccctcctcaacagaatcttgtgagggcagtcagaccaccagtccttattctgtaaatgagggccagatccttcctgctaaggcgtggaggtggccgcttctgccctgctgccctccagagtggctcctcctcctgcccaaggagccatcatggtgggtgcacaagcctcggccctgccctgcctgtgggtttttatcgcttcccagagcttcctctgcctggtccagtgctcagaagcttagatgaggagcagtgagagtgaaaaccctgtgcccacccgccctgccaggccctcatttgaggccaggccaggaggtggtacttgcagtgagagcctggtttctgttggctgttgttcctttcgtgagtggtgatttttctcttaataaaataaattaaacactgagctgacaagtctgcatttggccaagttgggggaccgtataggggcccagagtttgtgagctctctgaggttggcaaactcatcactagctggacccttctggctttcccctttgaatagcctcgtggcccaagattcaagaagggcctaaggcatggggccacttgctcaggctggccacgagaagagccttacactaaaccaggtggaaccggggaccccagaagcttaacaaaagggtcctgcaggcccaaggacagtctgaaggcttaagaccctacaggagcctagagcacttgggtggctcagttggttaagt

SEQ ID NO: 19 - DNA, 101696 bp, Pan paniscus
  source 1..101696: mol_type = other DNA
ctgcaggagcagcttagctcggcttggttgccttggtctctgtgggcagcatcggaggggggtcgggaggaggaggaggaggcagcggcagagaagagagaggcgtgtgagccgtgctccaccggctagctccttcccactgctcccgcctggcagtgccaggcagcccacaccagcatggccttgctcatccacctcaagacagtctcggagctgcggggcaggggcgaccggatcgccaaagtgactttccgaggtagggaagcccctgtctcagagggacgccagctctgagagctggaccagcccatgctctggaggtggccggggataggacagggctgggaggatgggtgggaaaagttctagcaggggctggggcgacgagccttttcacaggtagtcatctgcccgggactgactggccattgtgatttctggaaaatcagggtcccctgttcttccatgcctgtgtctccttgtgcttgccaacatgccagtgcccgggcagggcacagagccctctgcctggggaggcagaagtgaggaccacatccctgagctcagggagacccaggaccccctccttctctctctccctctcctgcaggttgatttccttgagcacagggtgggggctgggtatggagcctgggacacccagggtgactgggagaaaccaggcagccagtagctccctgggccccagagtgatgggggacactgttggcttcttttagatctattcatgggcgggaaccctgggagcccctcgcctctcttctatctggtcttttctcatccttttcactcctgtattcagcgaccatttatcatgatctactgtgtcccaaggataggggtagaaacacagagctgagcacaacccagccccagccccaaggagcctgcatctcttgggcaggcgtggaacaagcaggacaggtatgtgagacagaaggtgggggtgcagcatgcaagctacagaagcagcaccctcacccaggctggtgaccggtggtcagggaaggcttcccggaggaagcaacactcagctgatacccgaaggaccagcaggtgggagctaggagaggaggtaaggactgagcaggcagaggaaacagtgtgcccagagctgagagaggagctgaaactctggaactgaaagaggttccatgtgtctacagctcagagagggtgcaggagcggaggccagagagccaagcagggcaaggaggcgaggctggacctgaccccggggacagcggagcccctgagcattttaagtggggaaaggcagggccaggctgactctgtccttcaccacccacctctgcctctccatgtggttgctgcccagccctgagggttgggggtgcttctcactagacatggccccttctcccgagagaggggtctgagagtgggatggggacgaggtggtgagaagagggcagagaggacccccctatactaaagagcaaagtgagccttggggcccaggctggacacagtgtctgcacctctgttggaagggatgggagagaccattggcagaacattccagcaagagccctggggcacccacatcacctacccagaggccctgggatgcccacattgcagcttgtgttcatagggacaggcaggggtggaggtgatggcagtggccttgctggcaggcggaggtcaggcaggagggaaagggaggtgtgggctgggctgccttttgcctcccaccccaacccactgactgctttctctgcagcaccctggatctccctctgtgtgccacctgcaggctcatgctggctttagaaaaagcaaatgtgtcctttcatctgtgaaatgtggccctgagctccatgggcagcatagtgtggggcggttaagctacaggttgccatcctgctgcagctgtgctggaacggtccaggctgcaccggacaggcccacttgcaggccgagaaaccaaggttccggggtagaacactgtgcgtggcattcacggaggggctgaggcacggtggtcccagctctcaggacctcatcctgagtactcaatcttgcaagctctttatctgctcctgggccacctgggggccagcaccttgtctgacacccatcttctccttggagcagtgaagggctgggcctttagcctcactgaccacacaggaattagtttatttgcaacccttgctctctggactgagtggagaaatcgcttccaagctccacattggcaggaggtggccatgggcagagctcctggggaagggggctgggcagcaggaataggcagatgacaagcagtttccagaaagttcctttattacaacgaaagatgcctcagccgctcacctgtgtcatctagcagttgacagctgtaggcgccccaaaagaccaacactgaccacaattcagagagaatggacccgctctacaatgttccttagcatctcccagcacatgcaaccactgggggccaagcaggtcctctgcagggggaaacaagaaactggtaaacacgcagagggagacactggccccaggctccccaaggcttttgagtgaaagtcaatgccgggggaggtggtgagggagcccttgctgagctgtgcccattggcagtggccctacgtaggacagagcagctggttgaaatatggcttgaccttctgtgctgtgccatccaagaccctaaagaaagagccctgctggtctatcgtggaaaaagttctggatatggagtcagaagccctagatcctacctgggttctgccactcaccctcagtttcctcatctgtaaaatgggcatgataataacactcacttcactagattgcttcagggaaaccataggtatggaagagtttgagggaagagtattcaaatggccgatgtgtttgtgaggcagccattcccattctccttgggagcagctgctggcccctgaggtatcttctctccagaccagcagagggccccatgtgagatataaagggaagaggaaagcacgtctaaggggttccagtctgccaggagcaggcagagagcctggcctctgctctgtaggagcctctgctgagatgttccgcaggaacccaggcaggcagacccccgagactcctgttctcatctggctgggtgtgcaccagctttgcccgtggccacctcttttcccactgccctcaggtcagtcggcccctcgctcagtgctcccagccagttctgtatctagctcttagttcttactgcccctggctgctcctaagctggtgctgccctgttcatgcatttcctgaacatactgatatttgtgcacaggcctgggaccctgaggtgaaggggccagcctggccctccaggagtcacaatcccattgggtcagacaggagatagggagtcctgggtgaatctctattgtgcctgcaggccacagggctcagctgggtttctcattaacaaaatggagacagtggtcctcatttagctcagaggcctgcagttcccaggagtaatcaagagtgggctatctgagaaggagccatcttgaccacaggttgctactcaaagagaggaagtattagcttcaggtatttcctttatcaactcctgagatagttccctacatcaatcacagagccacagaacgcagggtgtgaagggtcccaaagttcttctagtccaaccttctgtccagtgctgagccccaaggctgggggacctggactgtaagggaaccaagtgacagactgtccagggccaaccctgatgtctcccttctctttctatcccctgagccttcttgccaagacatgaggtttggggattttctgtgtgagataagaacatctaaaggctggacctggcttccacataattcactgtggctggaaattggcacaaaggtttgcagggcatccccctccaccttttcattcttactcttcttcccaccctacccctgattcccaccctgctatgttcccactacattcaacttccagccattcccaaaagataccacacccttttacacctccaaactttgagacatcgatcatatttcttctgcctggaatgaccaccctccaccttgagaacgcccattaattctgctcatccttcaaggcccagctcatatgctacctcctccatgaaggagtagtactttgcacacaaagtactcctctagcagtactttgcacacattcttcctactgctctgccaaggtacattgcatttcagaaactggccacacctctgcatgctgcccaagcttttgagcatcttcaggatagacatcagacatggtttctgtctttgagggattcactgtgtcatgggtttgagttcttccactgtggcactgccactctttggctccatttccccaactgtgagctcccaccccagaactttctatccaaggaggatcgagggactggaagaggcctcaagggccaagaaccaagaaccttggctcttactccttccatcaacttccctagcccagagaatcttctagggctccagaggggcctaacaattttttttttttttttgagtctcactctgtcaccaggctggagtgcagtggtgcgatctcggctcactgcaacctccagctcctgggttcaagcgattcttctgcctcagcctctggagtagctgggactacaggcacatgccaccatgcctgactaatttttgtatttttagtagagacggtgtttcaccatatttcccaggctggtctcaaactcttgacctcatgatccgcctgcctcggcctcccaaagtgctgggattacaggtgtgagccactgcgcccagtcaagcctaacaaatattagcaagttcagctccagcccataggtgggaagcaagagggattgcatgtgtaagccagagtcaattaggggaagacagaggaaggagaaagggcagacgggaaaggaggtgggagcaggctctgaattggcccctggagcccagaagggaggcgggagtttttattgagcaggggaaatgggtggtatttaagaagccactgaaggatcgtagttcattggcaggatcaaaggccatgaaagggccaggcgtggtggctcatgcctctttccgagccttactgcgaccacacatggggcaggatctcaccatctgacagaggagaagaaacatacacacagaggtgaaaggagtgcagcatacaggagggccagcggtgggggtaaatcgcaacaatgttcagaggatgacagcttacttagagctacagagacgagggaaaaggagcaggaggaggaagtgcctaagctgggtctggaaaaactgcccctgtttgcacctatggagatgcaggaagtgaggaattggtgatggaggaaggtgaagtcattttgggtgagggactgaccagaccagaggccagaggaggagaattgcagccaagttccatgtcggggaagccacaccatgtagctggagcagaggctataggaagtagaagagggagaccagctaggaaaggagcaatgggcctgctgagtgattgtgcagggaagggttgcagctgaggcactggggacaagatgtccccctactgttggctgcaggcgcgacctctgactccacattagatttgttttccccagtaaaatgagggagccctccctcttgatgataaatatagctactatttggaaacttatctgccgcccctggtaaaggaggcagaatacccagtgcacccacccctgaaatgctcctgcaatgcctaggcctgtctgtgggctgtggtccagcctagcaccccctctcttggagaatgtgaggttggcattgtccctgctgaaggcagcaatagaggggacccttacaatgaccttggcagccggtggctggctgtggacacagccctgcgcttttgttttagtcctaacggatatgccccctgcatcctccattcttcacagcacactcagaccccctcaccacacctgagggaaatcttctctgcctaatgccccaggtagtgaatgttcacccctcctccctcccccagagcaagccattgcacaccagcgaacagcagacagagcacacagaaaattccccagacttctgctttgataggaagagtgtgttttcatgtaatggaaatgattgtaaaactgccttcccctgcaaaagccctcaggaatatgctgctggaaatgtgcttgagaacagacttgcaaatcatttctctgaattgggaagtcttggttatcttagccacttttaccgatcatgtgaaagccacatctctcgcacccactcccatccctgggtctcatttttttttttctgtcgcccacgctggagtgcagcggcacaatcatagttcactgcaacctcaacctcctgggttcaagcgatgctcccacctcagcctcccgagtagctgggactacaggcacgcaccaccatgctcagctaatttttgtatttttagtagagatggagtttcaccatattgcccaggctggtcttgaactcccgggctcatgtgagctgcctgcctcagcctcccaaagtgctgggattataggtgtaagccactgtgcccggccttatcttttttttttaactttttatatataaaaaaactctcaaatacatacaagagtggggagaacagtatcatggccctatgttgtcccatccaatttcagctaccatcaattcatggccaatcttgcttcatttgcatcccatcctacttccccaccccaaattattttgaagaagaccccaaaccccataccattccatctgtaaatattcagtacatagctataaaagataagagctcaaataaataccacatactttgtcattttaaagaaattaataacaattccttagtactatcaactaatcaggcagtcatcaaattcctaattgtctcaccaatgtcacaatttttttccaatttattaaaagcttcattttaatgtgttttgtaaatcaggtatttaatcatttatccactcattctgttgaagggcagccatgtgccacgcactgggggatggtggggaatgagacagacatggttcctgtcctcaaagggggaagatgaccactgcacccatcatcatgaggagctttatggaagggaggcacaggtgcccaggcagctcgtggtgaggaaacccacttagcccaggatggggggaagccaccccagtgcgtgagccagagtcagttgggggaagactgaggaaggaggaagggcagatgggaagggaggtaggagcaggctcctagttggcccctagagcccggaagtgagtcaggagtttttattgagcaggaggaatgggcggtatttaagaagcccttgaagggtcgcagctcattggcaggaacaaaggccatgaaagggctgggcatggtggctcacgcctgtaatcccagcactttgggaggccaaggcgggggggatcatttgagggcaggagtttgagaccagcctggccaacatggtgaaaccacatctctactaaaaatacaaaaattagccgggcgtggtggtgcacgcctataatcccagctactcgggaggctgaggcaggagaatcgcttgaacccaggaggcagaggctgcagtgagccgagattgtgccactgcactccagcctgggcgacagagcgagactctgtctcaaggggggaaaaataagccatgaaaggctccatcccaggcagaggggctaacactagtgcagacgtggtggtgtggagatgcatcaggggagtgtggaggggagactggaaggcagggcatgggggacgcagccaaacacggagggtcttctgtgtcacactcttagcaggagaatgggatgctaagatcttgttttggagagaaggctctagaggtgaggactgcgggcagggacactggggaggaagcccagggcaggcggagggctgagtgcctcagcaggcaccatgacagaggaaggagcggcgctgggatcgggggagtgagtgagagggcagggcaagagtcaattgtggtcctggggaccaccgtggacccagggatttggggtacagggccttagttgattctcatctagactcctgccagttgctgacaccctgaattctggcaaacatggagacatcagggtggaaacacctggagccactgccatccaggtgggcgccttgagggccaggccccttggctgctttcccagcagcagcatggagcctggcacaggacagacctggcatagaagtgggagaaaggaacaccgcctgtgggtgcaggagcagtgatcagttagcaacaggggcccccctgcagccagccatccaggcagcaccagacagtgatccatttctatcggtgacagttctagaaaaggctccggagacagggactatcatgtgatcatttttaccctagaccgcttgaccgctttctgtctgaactgatccacctgctagacgctgcctcaacagtcctcgtttctattttattttcttttacttcaaagcagaagggctaatctgctgaggtggagatgagttttcacccactggcttttttttttttttttcagccaaagtttaagataaagtcaggactgcagtttcaacaatatttttaccctatcggagagtaaaagagtcaccctcccattatacctcattgtattcccagtgcctggcacagaatgggtactctacacacttgtggatcactgggaccacaagctcctctgtcaccgtaacaggagaatctaggacccagcagttgatgactgtgtgggtggcactgtccaagtctcaaagacaaataccacaggcccttcctgcctcagtgccagggtctgaaaaatgggaaccagcactttcagtcagttgcagggcaaagtcagagtttgagtgaggacctggaagaagggtttgagctgagccagacagatgggatttatcatccctgccctgcccctgcctctcagatgaatccctgacccaagcctaagtttccatagtgtaaacctggaggttagcagggtgggttaaggggaaatacatgagtggaggtagaaatgatattttagtacaatttgtggataataaagggttagagttccatggggcctccatttagctgagaaatggggaaaatggaaggggtaaccttttccagtgggaggcccagggactctgcagtatcccaagtctggctctgtgagtcattggtgattttcagagagtacactctgtaagaaacatgaggaatagctgctttcttggacaactctttgaattgaatttctttcttctaccatgccatcaactgtcattataaaattgaagatgtgtttctcacggggaaaaaaagtgttattacaagagataatcacaaacaactagacaggaaaatcataccaccgtcaaccaccttgacgtaactggcatttctagaacattacacacccaaaactgaaaaatatacattcttcttaaatgcacacagaacactcaccaagatagaccatatgctgggcaattagacaagtctcaatacatttcaaaagactgaaatcttacagagtatgttctctgaccatagaggaattcaactaaaaatcaataataagaagattatctttgaaagttccaaatatttggaaattaatgcctttcttaacctatggtcaaagaaggaagtaaaagagaaattatgaaacattttaaactgaattataatgaaaatacaacatattaacatttatcattttaagtacttatagcagaaaagaagaaaagtgtaaaattgtaatctaggtttctgccttaaaaagataccaaaagaaaagcaaattaaacccaaatcctgaaaacattatgttaaataaaagaagccagacacaaaagaccacatactgtataacctcatttacagtcaggcatcgcttagtgataggagtacattctgaaaaatgcatcattaagcgattgtgtcattgtgtgaacatcatagagtgtacttacacaaagctagatggtatagccaactacacacctagactacatggtatgacctactgctcctaggccacaaacgtgtacagaacataactgtattcaatgctgtaggcaatcatagtacaatggtaagtatttgtgtatctaaacatagaaaagatacagtaaatacaatattataatcttatgggtccactgttgtatatccaagtggtcgttgaccaaaacggtgttatgtggtgcatgaatgtatacgaaatgctcagaacaggcaaatccatacagagaggagatttgtggttgtcaagggctgtggggagagtgaatggggagtgactgctcacgggtatggagtctccttccagggtgatgaaaatattctggaattagatagtggtgatgggtgtacaaccttgggaatatactaaaaacgactgaactgtacactttagaaggatgaatgttatggaatgtgaattatatttcaataaataaaaatcaaacaccccccaccaaattaaacccaaggacagtataaaaggaaggaaatagaaaatagacaacagagaaatttaacaaagccaaaagttggttctttgaaaaaaattaataaaatagataaaccctagtaagacttatcaaaaataaaaagcaagaaaacacaaattaccaatatcaggaataaaagagggaatatcattacatttaaaggaaaatatgggactattacaaataacttacctcaataaattctacaactcagatgaaatgaataaatcttttgaaaaacaacttaccaaaactgacagaaaaagaaatggaaaatccgaagagcctccatatctattaaagaaattgaatttgtaataacaatgatgatgatgacaataaacttccttccacaaagaaaacttcagatctagatgatttcactgctgtattgtaggaaacattttttttttctttttttgagatggagtctcgcactgtcacccaggctggagtgcagtggcgcgatctcagctcactgcaacctctgtctccccagttcaaggattctcctgcctcagcctcccgagtagagtagctgagactacaggcaggtgccaccacgcctggctaatttttgtatttttagtagagacagggtttcaccgtgttggccaggctggtcttgaactcctgacctcaagtgatctgcccatgtcggcctctcaaagtgctgggattacaggtgtgagccaccacacccggcctgtagaaaacatttaaaggaaaacgtaataacaatcttacacaaactctttcagaaaatagagaaggaagagcacatctcaattcattttatattatcaaaacctgacaaagaccttacacaaaaagaaaattacagcccaatatctgtcatgaacacagatgtaaaaatccttaacaaaatattagccaactgaatagcaatatatgaaaagaataacacatcatgacaagtgagtattatcccaggaatgcaatgttaatttaaaagtagaaaatcaaaatattttaccatattaacacagtaaaggaaaaaattcatgattatatcaatagatgcagaaaatgcatttgacaaaattcaacacccattcatgataataactatcagcaaactaccaataaaaggagcttcctcaatctgataaaaatcatccagctaacattatacttaattcagaaatattgaacattaagatcatgagtcaggcaaagttttctactctcaccacttctgttcaacactgtgctagaattctagccagtgcaaggcggcaaggtaaaaacaactcctgcagattggaaaggaagaagtaaaactatctttattcacagaaaacctgactggttatgtagaaaaccctaaggaatctattaaaaagctactacaattaatgagtgaatttagcaagttttcaggatatgtgattaatacacaagaaaattaattttaccaaagacaggaaagacttccaccctaaaaacaaaacaacacaaaatgctgagagaaataaaaaaaaaaaaaccaaacatgtagaaaatagattatgtttatggactgaagattcataattgttaagatgacaattctccacaaaatgatctatagactgaatgcaatcctaataaaaatcacaacaaactattttgtagaaattgaaaactactttaaaatttatgtggacatgcaaatgatctagaatagctaaagcaaccttgaaaatggagaagagaattggagggttcacaccacagctgacccctgaacaacatgggtccacttatatgtggatttttttttttttctttttgagacagagtttcactcttgttgcccaggctggagtgcaatggcgcaatctcagctcactgcaacctccacctcccgggttcaagcgattctcctttctcagcctcctgagtagctgggattacaggcatgcaccatcacacccagctaatttttgtattttcagtagagacgaggtttcaccatgttggtcaggctggtctcgaactcctgacctcaagtgatccaccagcctcggcctcctaaagtgctgggattacaggcatgagccacttcgcctggccatgttttctcttccttatcttttttcctaacattttcttttctctagcttactttattgtaaaagtacagtacataatacatatacaaaatatgtgttaattggctgtttatgttatcattaaggcttctggttaacagtagtctattagtagctaagtttttggggagtcaaaatttatacgcagcttttcaactatatgaggggctggtacctctaatccctgtgttgtacaagggtcaactatatttaattataagtctaactataaagttaaaggaattaagaaagtgtggcattggtctaagaatagacatacagaccaatggagcagaatagtgtccagaaataaaccctgtacatataaaatcaattgattttcaatcaaggtgttggatatctagaactaggtatctatatggagaaaaaatgaacttcaaactcctacctcataccatccacaaaaattaatgtaagatggattatagaattaaacattaaaaacttataagcttctagaagaaaatatagaacatctgtttttgtattcttgggttaggcaaaggtttcttaaagaaaaattttaaaagactaaacataagaaataaatttcactaaaaacttgcatttcttaaaaattggaaactctctttggctagtcacagagtaaaaaaatttgaaaactcctattcataaaaaaattacatttaagaaggcaagagaaggcaagtcacacacaggaagaaaatattcacatttatctgacaaaggacttgtagccagaatatataaagaacccctataagtcaataataataagacaaattatgaaattttttatataggcaaaagacttgaagagacactccatagaataagatagacatatggccaataaacatgtgaaaatgtgatcaacatcctaagtcattagagaaatgaagatcaaaattccaaagagatactatttcacatgctctaaaatagctaaaatgtaaaagtctgacagtaatcaaatgttgatgaggatggaacaactgaaattttttttacattgctgataagagtgtgaaatgatgtaatccccttggaaaactatctggcgatttcttttttttcttttctttttttctgagatggcatctcgctctgtcacccaggctggagtgcagtggtgcgatctcggttcactgcaacctttgcctcccgggttcaagcgattctcctgcttcagcctcccgagtggctgggactacaggttcgcaccaccacgcctggctaatttttttttgtatttttagtagagacagggtttcaccgtgttagccatgatggtctccatctcctgacctcatgatctgcctgcctcagcctcccaaagtgctgggattacaggcatgagccattgcgcccggccagcaatttcttataaagctaagggtacctatcctgtgacataaccattctgttcttgggaatttcctcaagagaaataaaattatattttcagaaaaagactcacatgaatgtttacagcaactttgctcatatagcccaaccctggaagcacccaaaagtttatcatcgacagagaaatggaccaagaagttgtggtataggcatgcaacgggctatcactctacaataaaaatcaatacgtcacttatatatgcgacaacatggatgaatcacaaaaacattaccttgaccaaaagaagccagacacacaaaaagtacattctgtaggataccatttatgtgaagtttaaaacaggcaaactgatctttggtgctagaaatcagagcactggttactaagggactagaaatcgactggaaagggacatgagagaacatgtggaacaaatggaaatgttctatgtcttgattgtgtggcggtatacagggaaatgcatttattgaaactcattgaattttacacttaagatccacgaatgtaagtttcacctagttttaaaaaagaagagagactcacatctaaaatacctaaaacttgaaaaatattatataagatgaggaaaaaattatttctgattacatgctactaaaaataagctacaaatgtgattcataatagaagaagccatttttatatgtagcacataacttaaaggtctaaaggacaagcaagctgggagcagtggcccacgcctataatcccagcactttgggaggccaaggcaggaggatcacttaaagtcaggaatttgagaacagcttggccacatgctggtgaaaccctgtctctctaaaaatacaaaaaaagttagccaggcgtggtggcgcacgcctgtaattccagctacttaggaggctaatgcaggagaatcacttgaacccaggaggtggaggttgcagtgagtggagatcacgccactgcactccagcctgggtgacagaccaagactccgtctcaaaaaaataaattcaaaacaaaatagaatgaaggagaaacaagactatttagtagactgagaatagctgtttcttattgagggataaactgcaccaaatgctgttgtaagcattattatttccttcattttaagggtgaggaaacaagggcaaagagaagttaattagcttcatccagggcacgcaaactaggaagaggcagctgggatttgaactcaggggctctggcccaagagccttaacctctatcctacgccccctcgtgcttgtaaaggacttgatgctttacttagactttcccacaacagtttcttgtcatcctcgtgatggtcccaggacacaggctggtccaggataatgacccccagctaacagatggtgagtctgagaccccaaggggatggatggccagctcccaggcctccagaccaggggccattgtgccagaccgcacacctgagtgggcctggctttttcctgcacgcaggggtgcttgggccctgcttcctggtgctccatgggagtatctgtccttcaaaatgaacagattgatctgaagtggggagagagaaaatacagcaggaccaccactcagagagtcgctgtagaggaagagagggagaggagacgccaggacatgggagcgttgtgggagggaatgggactatttgctgagctttatacagcccagcccaggcagtgcatacaacaaggctttgctgattttaaataacgcgaggaaatagcagccccaggtctgagtcaccagcagagttttactctatttctcagttcccacagggacaatagcaatggcgggcactgctgggagacaggccagtgggctgggccctggcaaaatcatgacgtccttgaaaacagtcccaggaccttctccttccccttcggatggcccaccacctcaccctctgccctttcgggaccccagcccctctccagtcttgcttccacaggctgctccctgagggcagaccatttttgcttttcccttcaccatcgggactcccctgttctgtgtccagctctttgggggctctactctctgctctacgctttcaaacatttccttacactgttctctctgcctggatttccctccttctccttgcttcccagtctctctgaatatccagatttcttctggtcttctagcgtcaatgcctgtgcctctgcaatgcctctttaatccattacattgagagtcattgctccttttcctgtgttctcactttatttacactttttgcatgccaatgacaaaattctgccttatatcatcggcagaattttccatgtctgatatatctccctctggattgtaatacgctcttaaaggcatcgttcagatttgaatgatcttagtacaactcccctctgtgaaggccaaatggcacacaagccaggagcaagaaagccctggttgcctgtggaaatgaatgaacacacatgggctggcagccgtgtccctgcacacctgccttttctcagaggcgtggccctagcagggtaagctgtctggaagagggagctattttgtgcagatggaacattttgtccccttaaatcatgtcccatgaaaggccaacatgccatcctgcttctgaaacaagcactgagctcgtctccatttggagaagatctgtcgtgtgggtatttttaaatggtgaaaggagaaatgggtatatctgataccatggcgcttgttacactttgagcacagactctgctattcatactccatctattgactcagggaggagtttatttcaaaccaaacagctcagctatcccaggagcagctgcctcagaaggaaggaggatgctgttctattttccccatctaacctccttctcactcgatccacaacagcctttccatgcaaggaagaggctattttctttcaagctttattctccattttccctgtggcaagaaaggtgattggatattgggatttgtaatggttttatctgaaagccatttaaaatgaagctggaatgtcaacaagactgacgctgaatggagtagatgtgaagtggaaatgaacttgaaacaagagatggggttagtcatccccctgatcacttggaacagatgatggaggtcccctggctctgctccagtgaacagaacagaaccacttgaatactgccagccactgtttgtacataccctcctgaaacggctcttccaaaatgctgaaggacattttgttttcttaataatttggcctttccactgtttctgtatgattgatgtgtttcagcaaaccttttttaaaaaagaatatctagaggtaaatttagctcatcatgtttgagaatattcaccatctctaaatccccagggcctaaatcaatgaggttttagcacatttcgaaacagaaccctgatgtataaattctgcaatggctgatttcacgtattttacttcctctctaacaaagctatggaaaaatgcacaagcaggggagggtttgagcctcggtgcttcctgcagatgtgaatctgacaccaccttggagcagggcccctccccacccactcccaatcctccgctgggttgctccatttttcactccaagagaccccgcaggacagctatatccgaggcttattaaaatcttctaggatgcaaaggtctttggttattcagagcagcaggtctttaggggaagcccccatacacaaacatgctcagctgattctcaatttatattgtgtgttacctgcggggaaaattaaaagttcaaacctcaggcactttccctctcctcccttgattgcccgggggcttgttgttgagatatttcttgttgatttttttgttttttatgtctctggctggtgctaaacattctttctttcccatcatgtttacttcacatctctttgctgtatagatagcttctgctttatggttttttcctccttatctcagatgcagccagcccttccccacctgcccccgccccaaaacacacacacgaacacacaccctttcagactgcatccacactctctgtttcagtggatctgacatcaacgaccccgccacccccggccctcgtcagaggggagctctgcattgaactaggactagctcctgggtcataaaagttgctaggaccctggagagctcttactaaacagatgaggccaccaatgccagaggagagagatcatttcccagagggaacgagcctgctttgctgagcccccttccttgcccagcccccagacccatcacagggaaggttcagaggagctctgacccctccagtacctccttggcctgacgccgctctagcccgggctcccaggttttctgtagggagaggagcacagtctgctccacccgtgccatgggcttcatcagtgacaacccaaactcacccccaaataggaatggcttcaacctggagacagcccttcaatgaaatggtttatgctggtggagatttaaaggtatttgtctttcggctgggtgcggtgactcacacctataatcccagcactttgggaggccgaggtgggagatcacttgaggccaggaattcgagaccagcctgaccaacatgcagaaccccatctctactaaaagtaaaaaaattagctaggcacagtggcgcatgcctgtaatcccaactacttgggaggctgaggcacgagaatcatttgaaccccggaggcagaggttgcagtgagccaagattacactaccgcactccagcctgggtgacagagcaagactctgtctcaagacaaacaaaaaaggtgtttgtctttcaattacaaaaatcaagcatggtcactgaaaaaaaatttaaattcacattttgttttgttttgttttgtttttttggtctttcagccaggcgcagtggctcacgtcaaagtatgctgctttcagtatcttctcactctccctccccagggataaccactttcttttttattttatttatttaattttttttgagatggaatttcactcgttgcccaggctggagagcaatggcgcaatctcggcccaccacaacctccgcctcctgggttcaagcgattctcctgcctcggcctcttgagtagctgggattacagacatgtgccaccacacccagctatttttgtatttttagtagagatggggtttctccatgttggtcaagcacttcttgaactcccgacctcaggtcatccgcccgcctcggcctcccaaagtgctgggattacaggcgtgagtcactgaacccaggggggtaaccactttcaatggtttgagatgtttgtctcttcatagaagaaatatatgcatataatttgggttttgttttttttttaattaatggagttgtaatatacatgctgccttttttcccttaccatggaattgacacaggataataaattaattctaagcaacaaatttttctttaacccatcctgtctctaggtttctcctcacagaaattacaaccccttctcttgtggttccatcccatccctaaaacagtatttatcctcccttctctgtaccattactgtttcttgtgagaaattgtaccttggagtatgtactgaatggtgttgtactggaggcatggcgcggtgactcacgcctgtaatcccagcactttgggagaccaaggtgggcgggtcatttgaggtcaagagttccagacgagcctggccaacatggtgaaaccccatctctactaaaaatacaaaaattagctgggcatggtggcgggcgcctgtaatcccagttactcaggaagctgaggcaggagaattgcttgaacccaggaggtggaggttgcagtgagctgagatcgtgccactgcactccagcctgggaacagagcaagactgcatctcaaaaaaaaaaaaaaaaaaaaaaaaagtgtttcccttgcactggtgccctgttggctcctggcctcccttctagaccatcagctacctgtgggtgggagcctgtgcctttgtcattggtccatcctctatcccgaggccccgggacatggcctggaacatcagagactccagcggctgtttctcaaagtgaactgaactagctggtgtttcccacacgttggagccccctcaacctgccctcgattctctcctgacttatttctccccacatcttgggccagttccaactggactagcaaagagggcagctttacctctgtgctcccaacatgccctactgggtggcgtatggatgggggagcctgggacaatgtgtgtccatctcacacactctctacttcccatgccagtggggaaagtgggggcaggaatagagcccgggagggaactgccagagaccgtcttctctgctaaggctgacaggaagatggacaaccatgacagtggtggaaggggaagccccttggcccacggggaatggctgtctgggagctgacttgttgttgggggcctggtttgggcaggagcccctggggtggctgcagaaggaggctgggcttcacagacccctgtcggcaggcaggggctacgccccctataccaggcttctgctcagggcagcagggcccggagccaccagcagagctgaggaggctgcagaggaggctgagagatccgtggaggaagagcgtggtggaaaagagtgcctgaggtccgcttccacggccactctgaccagcctgggccttctgtgccttagcattcccgttcctaacatggaactcatggcctttgaccctcttccctcacgaggctgctgagagggtcagagaagaagccgcatggggactggcctcgccctgggagaggtgtgcaagccacgaggtcccatgttgcatgacaagtcaaatgctgttaggacgactcccaggatgaggaggtctgaccccacgctcgtcgtctggacagctctgaccctagaatttatttcctctttccccacagggcaatccttctactctcgggtcctggagaactgtgaggatgtggctgactttgatgaggtaggaggcccaagactcccccctccctcagccctgagcccagaggggaacaaccacccttcgctgcctcctgtgggcacacactggccccaaatcccaggcgccggcctactctgagcccctcacctctcagctgcttcctgaaggaggtggtaaggagggtgtgcaggaactccctcccgcatgttccccccagaaacctctgcacaggtgaggcccgtgtgcaaatgacacggggaacagcaacctggcccacctcgacggccctgctgggtctgggcctgttattccctgtggagaaagagcccacaggtgctgtagacctgaatgtgagccaccagctgagggcccaacgaggcaggcgagtgctggggacgtcgcaaaggccagtctgtgtcagtccccaggggttgaagagcagggcagccccgggcactgaggtgggagccccagtcaccagggaaacattgtcaagcaccccacgtgagtgagggcgccatctccagaccttgaggggaagcatagggaacagaagacagtctagattttcagcaacagctctgggggtgccatcagaaaagacgtgagctgctggtctattgacaatgatttttctcaatcctcactccagctgggctgttgtcacaattttatcagcaaaggagcaggcgacaccatcccacaggggtgcccaggagcagtgagaggacttacaacgcttccctctccctgcccgtcccctcggcacgtggccgggctgggagccctattctcacacacacaccagctcgagcagcctgcggcctcctccgcctcctcacattctttcgtctatgtgtttgctgcttccagaatctatattcccctctggctgctgtagtttctccagggttgactttggagtgagggccagcagtcatccgtcaccatcttagcacaaactggaagccatgtagtgaccctcaaatagtgtaccccctctctcctggggttggctctcccgcttggctctgtgggggctgggaagggcctcatagcagactgtgcctcttgaggttggctgctggcgttcggctgagcagccaccaggctgacacttagcaccagctgtctccccctccttctgaaaccgggccacacgatgtggctgtgtccatcgacccagagctggagacacagggagcaaaacctcgctcctcactcaggcttaggcacagccatcaaccatcgcggcccagcaccacaccctccccaaccacttcagggcgcagttgccacgacctccctggtacgtccccactgctatgcaggacaggtgaatcactcatttaaagtgaatcactagagctaaggaagtttctgtccttaccttctccccctcctggctgtataatgacctcagtttctaaacccgccaccatctttgtcaaatggggttggtgatgggtgtgaaggtctctgtgaaatgatgaacaaaatgaagggttatggtgagagtggaatcatggctgcccactgagacagctgtcatagatgcttcaggcttgccccattacacacccggcctgctccctcccctccccatttcctcagtcagggcactgggctggctgggagaagatgccagcagcctggcccagtttcccatagtcctacctccctgggtttctgcccactaatccaccaggcacagcatcttactccctcctcccaagactcccaggggatatgtcagcccaggcgttcagccagggggcaacctgatgccccttccaagggcactgccacccttttccatgcccagcgccttggacacctgagccacaggtatgcatgacattcaaagttaatcaccgtgtcgttcctcttcccaactctgcccagcccgcctcagggggagagtctgtctctgctggccctgaacaaggggccacattccgagcatctagtgcatgccagccgggcttgagatatcccagaggcaggaacctgggctcaacaccccatgatgatttgtatgggagcttagggatggggtagccagagtcagtgtggagagactggggcggggcagaagcagttatggaagaagcacatgactagggtcagagagcagggcacacgatggggagaagaggctcctgcccggggaaagtgctgcccgcccactggggagacagggaagtttctggttgttgcaatgaggagcctactggcatttagtggggtggggagcaaggatgcagaatgacttgcaatgctcaggccatcccccacttcccacctgggagccccgtgggaagatggtggcagccccagcagcagcactgagctgcttcctgagccatgccccttccactcaatctctgaaatcatccacagatgaaattaggctcagatggtaactacccttccccaggtgacagagctggaagcggccaagccagggttctgaattcatgcatagattagacctaagccctctctggatacagtgataggacctgactcccaccacccctgcaaggcccgtgttggagtctctccacaccccctgcctccatttctccctgggcaaagtggcctcagccctggccaccaatggtcagcagtgcacatcccacaaagcaggaaggccaccctcccattccctgttcaggaacggcccagaggcctgggtcagcccagtcccaaaggtagcctggagccataccctggctttaacctttctccctagacccagtggacatgttgtaaacttccctggcttccccctgaaagaatctgcctgccagtggttccagaatatcctgggaaagaaccctttcaaatccccctgaaccttcttgactttccagaaagcctcttctctccgccttactctgcccagggcctgccggagccagcttagtgagacacactggcctgggagtcatgagacctacaccacagtccttgctgaggaacctctttgggctttggattccccttctgtaaaagagagatatgctccctgctctatctgccccacgggactgtcacaaggctaaaaaaagatgaaatgagagacaagaaagcaaatgtctctcacagctctactaggtaagggattccaagcaagggagcggcccctcctctgctcaggcatgggtgagaggggctgcagcagctgggcttaggaacctgagtggggaggaggaggccatggaagaaagacaatgctctctacaacaatgggtggaaacagagcctggacatggtgtctcctttcccagaggctggaacctgagcccctacatttaacctacaacactggaaaagctagggagagacagagaaagacccagcctttgtgacctggggaagcaggagtagccacctttagccagtttggtttggctctaacacaggccctgtgtggaccaggccccaggggagaggccagagtaacaatagtacttgtgccaatgataagaagaactgctgctatttactgagcacttagtgtgtggcaagatgggctgagagcttgacacaagcattagactcactagaacttgctggattggtagcatcctaggtgataaggagccacaccaggatttaaacccaagtctatctgattccaggacctatggtcatttgtaaagtagacaagactcagccctgccctcagggggctcagtctagtgggcagatggacccactacaaacaaggagggaccctgggccttctgagccaagaggaagaagaggtctccagcctgggggatgacagggcaggggagcttggccttatctgcccctttctgtttgtaccaagaagtcatggctgttacctcctggaggccagaaacgcacctgtcttgttcgtcattggcctggcacccagcatggagttcagaaaatgttgccgagtgaaagaatgaaaaaaacagtgacattcactaagactggcacctgtcaccgcaggcctgtgcccagaccgagtgggctcagcagggctagtggtacatcaagccctttgctgtggcctggatagaaaagaagcaggcaaggcacagacgagatcacctaaagggactttagatcaccttgatctctaaggttagatatcatctagtttaaccctcttgtcttgcagttgaagaaacaggtcttagagtggggaagagaattgcccaagaagaccagctgagatctgagatcctacatttaacttacaactctaaagaagctggggaaagagacagagacaaagacagaaacagagagagagagagacagagacagagagacccagcctgtgtgccctgggaaagtgaaatagccacactagggatactgagcccaggtctttaagctcccaaatccatctctttccattgtactctaaagcagcagtccccaacctttttggcaccaggggctggtttcgtggaagacagtttttccacagactgggatggtggtagctgggggtgatttgggatgaaactgttcctcctcagaacatcaggcattagattctcttaaggagtgcacagcctagatctcttgcatatgtagttcacagtagggttcacactcctatgagaatctaatgctgtcactgatctgacattagatggagcttaggcgggaatgctcgctcacccgcggctcacctcttgctgtgtggctccgttcctaacaggccatggactggtactggtctgtggcccgggatatggggacccctgctctaaagctttgtagtgcatctcaatattttcccccaaacctatagccctgtccctttaaggatgctaccttgctgatttaggatggttccaggcccagtcagtggccaagctggacataatccagatcattctccaaggtacatcagggaaaccttttttacagagtcctagatcactggggctgataggatgcagaaccctgcaccccggccagcaccagccaggtcagggctaagcctagaccaggaaactgggtcaggactcagcactccccgggctcctgagaccaccccctccaacagaggccctctttccctccctatctgtactacctaccaccttgcttctgtcaacagtcctatcccaggctgctattccaggtctgtgtctgtctccagaactatccaggaccatccccaggactgagaaacaaccctgcatccctgcgttctgcacagcgtcatgcacagagcctggcacacagcaagtgctcagcaaatgttcgcccccagcatggggcttgctggctcgtgacatcttgagtgactgtgtttggcttaactgctacttgagtccccccgcagtaccaggcttcaggagaggattcagtatagtggattaagccctgaggactgaactccagactaagcgtcctgagacttgagtttgaatcctgcctctgccaccaaccagccttgtgcccgcgggcaactctcgcctctccactgtcccacttgtaaaaggagcacatctttgccatgttgctgtgagcttggttatgggtaaaaggtgctctggaagtactaagtgctacccagatgaaattcttccttcagaagcccttttccttcagtcttttccttcagtctttttttttttttttttttttgaggtggagtcttactctgtcacccaggctggagtgcaatggtgccatctgggctcactgcaacctctgcctcccaggttcaggtgattctcctgcctcagcctcccaagtagctgagattacaggcatgcaccaccacacctggctaatttttgtattttagtagagacacggtttcaccatgttggccaggctggtatcaaactcctgacctcaaatcatctgcccacttcggcctcccaaaatgctgggtttgcaggtatgagccactgcccccagctccctttccttcaatctaatagctcacaagttcaataccatagtcagaagaggagtgtagctcccaaaccctcaaagtcctcatctggtcttgctgtgttctcagcatatcaccccaaatggaggaaagaacataaccacaaaaatgaggagacaatgaaaaatgaaattagggaagagaagatgcagtgaaagagacacgtgaaatccacaggccgaggcagaagaggaaagtgatggcggcaagggggagggaggtggcatgacaaggagacaaggcagctgcagacctgcacagagttcacactgggaagatctaaactaaacacattctgcagtgctgtgtcacttacgactgctgtcacctgtgagatctcatttgattctctcaatagccctctaaggtagatattgtcacccccgcccccaatttcacagatggggaagctgaggcacagctagtgagtggcagagccagggctagaactcaagtctcctgactcaaactcagagtttctgcaacaccacggagactcccagtctgcgtgagatacaagcctcggtgttgtcagaagaacaaaaaagaagcaaagggtgggcatgtcctttggagttctgtgaggtgcccagagctcacagacgctgcctgagcaaaggaaggtgtcagcaatgggagatggggctggaaatgctgtctgggcacagcaagggggcctgtgggtgctaggaaagggaatccccacctctttcagggagctgtagaggagccactgaaaagttttaacaaaggagagataaaaagaggaaaattcaacccaaaaagtctccttcttacagtccatgcctctacttccagggaggccaaatgggagtaacccccagtcccagaccctgagtcacttccctccagccaagaggcccgtcaccctccaaggccccacactgatgccaggaccccacctagaggtgccggcttgattggtctccaggcctgggccttgggatttttaaaagcttctggaatggattgcagttccagccaagatgaagaacccctgagagagacagagggagacagagacaaagggagagatagagacagagagagaaactgatgaaagaaaacagatgtggtgaggagaagaaagcagaggaatgacgcgagagggaaggaaaagaaatgaggggaaagcctcgtgtgggtggaaaatgcgggagggagacaggggaggaaagaaaggaatctgtaaggggggagcaagtcagagaccgaagaagctgctgtgactcagtgaggaccctgtcttctccctcgcccagaaagcctccaagaagaacattcccccctgacataggcatggactgcccagacccggctgacgaatttctgaaagggcacctgagccacacacctacacgaacttcccctgattattctcatctgcagtcaggggccccggaagctccctgtctcctgtgccctccctgacccccgactctcactcaacaaacaggccctcgccccgcagccaggcagcctccctccccaggtcccttagcctcagcctcccgccaccgttcaacaccccacctccctttcacagggccatctccaaagtcatgtcctttttctcctgatctttctctccttccaatgccaaaatcccacccacagaccctcagggggaccaatcacccctcccctcttcatccccagtaaaccaaatctcggtggctcctgcggcccccccaactcccacacagcgccctggctgatgagctgggccttcctgggctgctttatttccctgcagccctataaaagcagcttcattaagaaaaccacacactctgctgagctgccagaggcatccagaagctggagccgcagccgctgaatgaggcctgtgggccgggctgcctccacttcctgggactctcagcccacccttctgccctgtgcccacctcgcctctgaagccctccctaggccctgctcagaaccctccccaccccaccccgcagacccctctcccgctcctctgcttcttcctccctcccttgccagtcctgaagggagatgtcacaaaggccgttttcctgagacaggccctgcccacactgggcagtgacccgcggtgctggcccagtgtgcccaagccctccaagtccccaggctgggagaaggaatctcagctttgggaatggcaaacgtgcagggtgggctcacagaagcctcctccccagggcctgctcagccaccaacagagtgctccaagtcatgcatctgctctgaggccgagttccttgtttatagagcacagaagccattacccacctctccagccattggaaagactaaatgaatgaatatgcacatagagcattcagacccctgcataagaaaaagttccccagaaatggcagcgattattactattattatttattactggactattgagcagtctgaatttggtagggtataaaaatggaactaaaaaataaaaagtcactgccttctaccagatctgtcaaaatcctccctgacacggtctctccacagcgtcttgagcagacctcagcgctgtctggtcctgtccaggagggcttcctactccagtctggcatcctgttcacccctggccatcctccttccctcatgcttgtggctcaggatgtggagtgggacagggacccctgctgaggccctccacatcctcccctggtgggaagcccatggaaaaagtgtcctcagatcactctaccccacttgggcaatggagcgcaaatcgatgacttgccacagccaacagtggcaggctgggctccttgccctgccgtgctctatgggtctcctgccagtccactgccctgcagatgccactggggatttgcatgccacgctgcccctcttgcggtatctaatcaccatgagctgtttccccaagaagtaccacaaaaacactacgcctaggacagaattcttcccatctttcccttgcccagtcttctttcccatcccaggaaggtgggctgggtgatggttggaggtaacagggcctttgaggaagccctaggaagatgtctggctctgcccattggcagctttttacagaatggggcactgggccactttagcctctgttttgagccattgttgccacttctggggcaccaggaaaaatcccaatcaaattcctactcatcattaacattaagttagggaggaaggaacaaagaagtggtaagggtgaatctagaaacaatgagttggggacaggctgtgggcctgaccccaataacactaatcagctcaaacctgtccccaatgttaccactgacagagtgaggagtggtttgaactcaacacaggagtctggggcagagcctgtgccagtcagggtgattctgatgagagagagctggcagctcacagctccattcagcacccatcaaaaaccaggctcacacccacattccttgctgtctccctgggacccgaccaccaccctggttgcaccaccctcccccaacccccctcaggagctgggaggccatggaagcagcgctgtgtagggagtcaaaagtcctggtaggtccaggctcttcacctaccacatgaccttgggcaggtcctccaacatctctgagcaccatctttgaaagaggagtgggcatcaatgccggctctacaaggtggttgttggaactaaatgagattccaggtgtcaatgctttgtccctggggagcactgggcccaagtgaggggccactctgactgttggagatccccaccagagattcccctcccacaccccatggctcctacctgttattgccaccgaagccgcagttgtccctctctccccagacgtttcggtggccggtggccagcagcatcgacagaaatgagatgctggagattcaggttttcaactacagcaaagtcttcagcaacaagtaagtgtgggatggggcaggaggggctgggcctggacgggctgggagcctgctcttctccttgggctaccctctgtttggggcttaaaagggggacctacactcccaacctgccctggattgattttcaaagactgaagaagtcttgggctggtctttgatccccattttgatccctcttcttgtcttcagaatcccccagttctcccagctgctgtcagccaagaacactccaccctcctatcacccctgctgtctccaaccccatcaaagcttcctgtctcaaagacttaaagctttaagtctccctcaatgccacgctggggtacagttacccattggagaggcgaaaggtggaggggctgatgatctcctccaagagacactctgtagccctgagggcaggcttgacagtttggggtggtggtttaggagtcaggcaagcctgatctcagacactcaggtcagtcatctactgtgtgaccctggaaaggttacataacctctctgatttcaatgtgctcatgtgtgaaaaggacaagtatttacctcaaagggcagctgtgtgaattaaatgagatagatattcactcactcattcaacaaatgtttactaagtgccgattgggtatcaggtactgaattaggtgatgcagagggcagggtgcctaccttcatggagcttgcactccacaagtgaagtacacctgccatacgagcattatcactataaggtgttcaataaaagtagttgtcatccttctctctgggccatgagaagaattcagaaggatttgaacacgctggaacagtggctaagtaatatcttgggttaaaaaatcacagccaggtgtggcacacacctgtagtcctaggtccttgggcagataaggcgggaggatcatttgatcccaggaatttgaggctagcctgggcaacatagtgagatcccatctctttaaaaaaaaatcggttgctcttatacaagctggaggtcatggcttaactgtaacatgtccaagaaggtgtggaggtgttagctcactgaggactcagaatgactcaacagtgggaggagactacaaacaaaagaaaagtaggcctcatcctaaatcatactaatagaattaaagcactcctgatctgagcaggagagacaaggagtccactgctctgatactggtggcagagaattcctgtaggcaccaccctatagtttccaggaggaaagggactttaagtgttaccttataacaaatggatgagagcctgaaagggaaaatcatagaggacatattcatccattcatccatccattgatccatccatccatccatccatctatcattcctgttattcatccatctgcctatccatttgtctgtccatcaattgatttatccacccttcctttctttcatccatccttccatcctttcatccatccattcatcaatccatccctccatccatttatcaattcatttatccacccatttatccatctatccattcatccgtccatcctttcattcatcctatccatccactcatcatccatccatccatccattcacccatccttcctttcatccattcattcatcaacccaatccttccatctttccatccattcatccaccacttaccctttcatcctttccattcatccttccatccactcatccatccattcatccatccttccatcttttttcttttcctttttttttttttttttttttgagacagagtcttgctctgtggcccacagtggagtgcagtggcctgatctcggctcactgcaacctccgcctctctggttcaagcaattatcctgtctcagcctcctgagtagctgggattagaggtgctcaccaccgtgcccagctaatttttgtatttttagtagagatggggtttcaccatgttggccaggttggtatcgaactcctgacctcaagtgatctaccctcctcagcctcccaaagtgctgggattacaggcgtgagccaccacttttggcccatccttctatctttccattcactgatccatctatcgatccatccattctttcattctttcatccatccttccatccatcatccttccttccatccattcatccatcctttcattcttccatccattcatccatccatccatccatccatcttttcacccaactttgcagtcactcatcatacatatagtgaacaaatgctttctgccagtcagacactatgctagtcactggagatactgagatgaggtattgaggcacagtccctgcccctaccctcccagaaggctttttgccacaggaagaggaaagaaaggtgtgtacctagaggcaggatgaggaacaggctgctggaagacagcagacaactgaaagatagccagcattttccagccaatgtgctgtcttaggaggtagtgagctccttgccactgggagagggtgagcaaagagtggaccacattgtagaggggatttccgagtcaggaaaggccccactgtatgggctccaaggagtctctgattctgtgggttttattaggagctttcaaaatctcagctgagtatggggcaagggcatttcagatatgctgtcagggccacagggaggatgtttagtgcacaaaggccttccctttgcctctcatggcatcacaccattcaggcagctgcttttggcacccacaagcaaggttggtgagacaccccccaccaggggcccccaaggtgaagcagagccttcttccctggggtgagataccatgagggtgtgacctatgaggacaggagaaacaggaacaagtggaaggctcacacacagaccaagtgggtgtgaaaaaggaaggagaatcagaagtcaagcaccagggagggcacctgagagcccctgaaggaacccaaccataggtgccaaagcatccaggagccttacagcttggccactacagccctagctgtgcaggaggggaaaccaagtctcagaggggaacttgaggtcacatgggtagacaatggtagagccagggctagaatgcatgtctgttaacttctcttcctaatccaactcccagaaaccaaaatatttgagcagtgatggtggaaactgagggcatggaagacattgttaaatcatttataatgaaagccaccagcctaaccactgaaatgctggaaacgcttgagcccatcaaaagactgctacaaacaaatcagaagtatttgggaaatcgggaaattgactaccatgccgtgaatatgttgaaagttacagcttctattaggtgtttttggtttttgttttgttcggagacagaatctcactctgtcacccaggctggagtgcagtggcccagtctcggctcattgcaacctctgcctcctgagttcaagtgattctcatgtctcggcctcccgagtagctgggactacaggtgcatgccaccaggcctggataatttttgtatttttagtagagacagggttttccccatgttggccaggatggtctcgaactcctggcttcaggtaatagacctgcctcggcttcccaaagtgctgggattacaggtgccagccaccaaacccagcctgtattagatgttcttaagtgccaataagaaggaagacagaaagggggatagttcctatcctaactctcttcttcttccctccctgcccccgtccaagagaaggcaggaaaccccacaaggggaggcccaggcctggtgggagaggttctgccatttctttggaagcctagagaatgcccagggcactgctggctgcagagctgagatgggaaagaagaggtccccttgtggagagcacaggcccaggctgacacaggccagcttgtgggggtcagagtgggacagaggtgtttggaatgatgtgagactcaagtctccccatcctggcatttgccagggccaggccagaggagcaatgaggccacagccctcaacccccacatggcccagttcagaccccaggctccttctcatggggcagctgagtggaaggggtctttgaggtctgcactaggcttagcaatgagcaaagccatggccactgctggggacagtgcctggcacatggcaggcccctgattattttgtggaataaaagaatgaataaatgcccctgtggtgttaggaggcagagggtaggtatacaaggtgggagagcctttgagagggaatcggagtggcccctcttctctgaaggactcagggcacccaagggtgacactcagcatcacatgactgatgcatttggggaaattgagctaaaagaggcatggaggagctgcctgggagagtggggcccaggacgagaaatgagcctgatcccatcactgccatctcagagagagagacttgtcctagaagcagagagcagcttggaaactggcccctcacccagtggttctagaggctgccaggaggcagagacatggtatgaaggaaggaggcatcctaggcagaaaccaggagacctccaggtctgcttggccccgtttggaacaaagacctgtgtccaggaaccttgggcttccccatgagaaagaaatgttcggttcagaagattttgtgcatccagctctgcctgtccgggacctctgagggtccatggcctggcctccagcctcctgcctgctaaggatgccagggaccctgaataattcaggagccgggacagcaggagaggcctctcagggcccaggacacctgacacgggctcccaggggaaagtgatgaattattgacaggattctggtgcccagttgccgctctattgtgatcagtctgtgggtccatctgggctggaggccttttcctgccggctaattacatggggatcttagctctgcccagctgcccagcccctcgtggggccagacagcctcctgtgaggggtgtcctctttgccatggtgacctggatggccctgtaaggcaagtagtcagaggacatggagttagccccagatcctttgcctgacagccccagggaaactgaggcccagagaggcctcttgtccagggtcacacagcaggttcaggacagtcaggtcttcaccccaggcctcctgacgcccgggccagtgctccttcccacagaacacatggcctcacaactccattcctagggaaatgactcagctgtctaaggagcatatgagcccacccttcctcaatcgtcctgggccccactctcccaggcagctcctccatgctgacccatgcagaggagtaagaacctactatgtgtgcagccaggatgcacaaaggccagctgcggcgggcacggtcgcctctggggtcaccacaagggccagagccaggggctcctcctacctcttcctgtcccagcttcttcccaaagaatatctatagaagacgggctgagggatggcatcctagaagcagtgccagggcctttgttttaaaactgttttcatggcaagcactgtgtttttgcttaaatggtatgttacagacctgtagaaagagtcaaggtttataaaactgcttttctttatactttacataaggctgagataatatcaattgtctatgtcaaaaaatataatttttacttttatttgagagaggttggggggtgaactgttaggagttaaaaccccccaagccactcctgggggtgtggcaaattgattcctttaatcttgcaagctcctagcgtcccaatcccaccctccgggccatagacaagctctggctgtgcgaggctgtgcacagcttgaagggtgggggacagcctggacctgcccctgaagcccatcctgcaaaggagactcgccctgtgtaggctctccagatggccagccctgctcattattagggaggggggaggggctggcatccgagtgccggtgttggtagaggaatttcacatgagcagtctcctcaccactgtccggtggaagtcggagggctatagcagaaggagccaaaaccacaccgctgccaggaggtggaatctcccttgggtcctgctgagtgagcccacatctgtctgactccagagcctaggctcctcactgtctacaccgcttccctttagggatggaattaatctgcatgtggacagggctcggaccagggtatgaagtgtaggggatttgcctggaggccaatctcactcagcacactgtgtgattaaggcagtggctgaatggactaccagtgacagccccatcactgtcaccgccaccagagtatctagcagggacttgaaagcacatgtcagggaggttgtttcagggattcctccgggaaggggcgctggacaaggtctctcaggttcttcccaagtataagatctgagattcaggcaggttaagcctagaaggcaccagacgcctctctgagcacttgcagggggaatagctccaccctgccccctgggagtgtcttgtcacattgcagcacctctgcagatcctgcggagctgccttggctgttcttaggcatctaattctggagaaagatgtgcctgatcgccccacgctcaacaggtgctcgacaggtcctaggggaatcaaggcagctgaatagccatccacaaagggtaatagcagagcagggattctcaaagtgtctccccagccagcagcttcagcatcacctggaaacttgtcagaaatacacattctcaggccctctcccacccactgaatcagagccctgggggcggggccagtggtgtgaactgaagtccggtggacccagtttggtgacttcacattagaagcttgaagttggccatggcgggagtatttatatctcagaaaccagcaaaagctacagatgagcacctctcctctcccaccagtgacacattttccagcatatccacagaggaggatatcccagccgtgcgtgttttcacaagccctccaggtgattctgttcatgctgaagtttgagaaccactgatttagaacaaaaaggggcgaggctgcaaaaagatgagtgtattctttcatgcctgtggtctactgttagaatgtctacatggtacggaagctaaaagtccccttccctcttcattttataaagaccaaattgagactcaggggcagcagctccagggctcctggcccccagcccagcacttctgtctctggggcactgcctgagctggggagaggtgcatgcagctatggaagaaggcttccatggggctgctctaagagcccagaagcccagttcggctttagagtgaaggagtggcgtggtcagtttcatcctcagggaggtggggcacaatggtggttggggctctgagctccaaaggggagcatttcatatccattcctcatggctgcccctaccacttcctcccctcacacagatgggaagatttttaaaaaatcaatgttcaccctccacagacctcagggtggtatagacatcaagcatgtctgagtcagaattcatctgatacctcacctcacccagatctaccattaattagctgtgtcccttccccttccgtggcctcactgtcttcctctataaatctcaggcagcatcagatgatgcccaaggtcccttccagctctcacatgccctggttgcttccctcgcctttgtgccttcagctagaaatggtgtgtgtattctaatccactctatgtggaagcaccatgtgagaatgtctgtctgagttccctgttctctcccagagcaacaaacagtcttctgactgtggggtgcaatggggttgaagtcaactccatcagcatttattgggcacccactgttgttcattaattcagccagcagatattgagatctctagtgtgctagaaatgtcaaacagaggctggaataaaaagcaccacccgtgcccttgagaggttcacagtttagaggcagtacatgaatcacgacaaaacggactgctttggagtgctggctgtgtgctgggggctttgataagaacactcgcagatgatctcattcagtcctccaacaacaactctgtgaagtagggcttatcagctcatcttatgagaaaaccgacactgagagagcttaaggaagttgcccaggaagcaggtagcttgctagtcagtgtcagagctgggttcagatccctgtctctttgatgccaggactgtgctgttaaccaaagcgttgcaccgcctctcccctgctgtgcagttccatgggctctgccatcacacaggttcctgccatccaggaacttacaggctgcaggtgtggaatggatgagtgagtgctgttggtgtgggctggaaaccttggtcatggttaggcgggtagaagccggaggagctacttgtccatccaggaaactcaggtcctttcccagcctccacattgagcatctggaagcttctctgcaagggctcagctaaagctggatttcatgcacctttccctgcagtctgtagacatcccctaagggtgcccactgccccttggagctctcccaaggaaatgggcctcccacaaacaaccatccacagtgggacatgctgccctggctgcaaccagtcctggctcctgggccaccttctctagcccagcccagagctggagcaagcccacctgagtcctccccaagcagtaacagcccttgggatgtcagtcttgctcctcaccctggtctcttccatgttaccaccgtgccccctctgccatccccaggctcatcgggaccttccgcatggtgctgcagaaggtggtagaggagagctatgtggaggtgactgacacgctgattgatgacaacaatgctatcatcaaggtgggtatgccccagggagttcctggactttcccatatggggccatctgggggtctgttctccctgcctcacacatggggtggtctggggaatgcctctcatgcatggcgaggtgtggcaggaggaggagactcaggtcagactctgctggaatggctcaatctgtggccatggctggaggccctgtggcatggcagggtctgctgccccacagtaggcacccctgcccttcctacggtgggaatgcaccaaccggtccttccatctggacccagctcaggagtcactaaagaggctcctttcatcatccaaaggccagactgagccctgctggcactcgagggcatgaccttcactctgcacatctagctcgggtcctccctgggagggcagggacctcatttcctattgtttgtcacatcccagcacttttgcatgagcacgcatgcactagtgatgcacagtctagaggcacctgacacatgttctaacaaagaaggaagcaaccctaccaggacagcctggccccaggctctgctctgattcttcagtcctcttgagctcagccgtggccactcatgggcagttggcatgatggtgaggaacagggaccctgggtatgaatcttaggctgctcactaactgtgtgacttggacaagctacatatcacctcaaagtgagcacacttacattatccacctcccaggactattctgaggattaaaggacaatacacagaaagtacttagaacagatatgcacaataaatctataatattgttagctatcatttcctgacctcagtttacccatgtataaaatggggctgtgccatggtcccccaatggggtcctgtgtaatatatggccgtatgtagtggccaagagaaacagcctcagaagccaggactgcagccacagggagctagaacagaaggaacgctcttctcccatgggcaggggtgggcagggagggcttcttaaagttaccagggtctcagccaccacagcaaggggagaaggggtgcagaataaactatgtatggacacccatgggaaggcgggctgggaggagaacacagaaacctggatgaagagtgtagggttggaagtgagataagagaattggggagtgagcagggatggacagacagcacagcccacgccctggattttcagaatcagacttaagatgtcagcagaggaaaggactcacagatctcctagcccacttgccacccatctccgctacccattcttatgaatgggaacaatgaagtcctggatggggaatggattcggccacagtcgacagcagggccagcacggagacccaggacttccaatgccagagaccaccattttcccacaacaacatacttggttccaccaagagggtcacatttgttccatggaaaggacatggggcttggagtcaggcagcctgggctcagatcccagctccagtacttcctagctgtgtgacttaaagcaagtaacttaacctcctgatatgctaggtaaggtaggttgcaatgttgaaaagatcaaatgagtgtacattaaagcatcttagcatgatgcctagcacagtgaggattcagaaaatatgtgcacctttcccttcccttgggaaatctaagcctgggtgttggagcatccaagcactgagtgagggccgcctgtctggggcacaggaacaagtcacctctagaccagtgaggaagggtgatccctgggcactggggggaaactagagctgcaagaaagtaatggccccaagacacagagcaggaagcccaatcatgattctccattgctaagcctgagcccagttgagtgctctactttttcccagaggaaaaccctagggcagctcccaagattccctccctctccagggtaggaagggtgagtgtgagcctgggccctgggctcctctcccggaggccactttcagctcattctgtcacatttccaacaagccgatttctggcgggccgtgcctcatgcctgcaggcagcccttgttctgaggagaggaggtggcctgatcatggggatgctgaacgacactctcggttatgtagacagtggactcagggggtgagtccaggctcagttgtgctgggcagggcaggcccctccaccttgagcaccagggaggagtggaaccaccagcagtgggacctggaaccagatcccagtaagctgacccggtctgcacaagtcagcctttcagagcctctgttttctcatcagcaaaagggggtagaggggatcataccatcctgacctcctccagtgaggcaagggtgtggaagcgctgtgtacacaccaccaagcagccacatatacggggtggagattgctgtcaccatcccagctgctcaccaccgcctccctcccttcagaccagcctgtgcgtggaggtccggtatcaggccactgacggcacagtgggctcctgggatgatggggacttcctggaagatgagtctcttcaagaggaagagaaggacagccaagagacggatggactgctcccaggctcccggcccagctcccggcccccaggagagaagagcttccggaggtaacaggcagggcccctctggctgcccactgctcccaagacacggggaagagacctggggcctggtcctactgacaggcctctctaggcctagctgggctcagagtacagggctgagcttctggagagacatccaaggggtgggaagatgtttctgtagccccccacccagccgtccaccctcgaggtcactgggcagggagcaggagactcagatggagctgcaaggccaaggcctccccagtggccctgagggaggtggagctctaacacagggatggggctagatctcctgcctttctcagagaaggggagatggggataggagggcccctggcctctctggttcaagacccagcagtgtccaccaggtgccggcagcctgacctctaccctggcccagtgaggaggcccaagacagggcggctcttcctgccagagtgaagccaaagatcctggctgggccctggcctttcttcctcttgagaagggagggtacccgggaacccccagaatccagcgtcacgccctgcaagtgtcctgccacccatggatcacaggaagctggatccaggacagctcattccacgtgcactatttttacaaaacagaaaatgcaattgtattactattagagaccaaagggacagaatctgggctagtctagtaagatgttgtccatgggttcctaagtcactaggaattatgtgttaaatgctagtaagtcaagggtgcatctgaaggaccagggtgtgttttgagaagggaccctctgtgccactggaaacatatccctgtaagctccttccacgctttcctttccaagtaaagtttactcagtccctctgctgaagaaaccataggttctaaattagtgtaattgaactgacatacttttatgggacacatatgttttctcctttgcacttgaatgagttcacacccccttaagcacccctcacacacaggtgcatgagtgcacacgtgtgcacatacacatacacacacacacacaagcttcagaaaccctgggagccagacgagtaatagtaacaaggtcaaagtgaccaggcctgcaacaaacatggcgggactgtctactccaggccagccacgggcatggggcagccccaggctagcttagagcctgtcccctcagactcctggctcttcagcagaaaacccaggcctgagtcctagctctgcctcttactggtcgtgtgacccttggcaagtctctgaccctctctcctcacctgcaaagaaggacatagcaatgaaatccccctgccctgctgctgggagagccggagggatcacagaggaacaggtggcaatggaggtgctgagcgctgcccatgtcccggctggtgacagacaaacaggtttcttgtagcacaacaatgcaaagagtcaggaatcgggttggaaattgtgagaagaggagcagtgctcagatggggagtgaagggatgctgactcagtgggcaccacctggtcctcctcgactgtctccattcagaaaagaggttggcagggctggtccagaaaccagaagccgggctctaagaaagggcttccagagaacaagatcagaagccacacaagggccatcagtcacagggaaaggaatgctggccccaaatcgggagagctaaggcccattaagtcccatctggactgtgccactcactggctgagtgacactgggcatgtcactagcccctgtaggtcagtaacaggaatgggttcagcaagttaaatctgtttcccctccaactctgatgtcctgagggacccatggacactccggacctgtgggtcacatccatgggaaacaacatcctgggagcccttagcagccacgaaggcaacctctctggggtggcgtagcaacacagagccagtttctcactcagtcctaagagagtgggccagggtgctgatgggggctctggagagcttagagtcccagagagccctgggcgccaggaatctggagataagagggctcccccgacacttcctcacagcctggtggcttccccacctctccccatcttcgtgtggcccctcccagggtagcagcaagaagcgggagcaaaaggaggggcttcaccccaggactgggaattgggagagggtgacagccgaagccaggcgcccccaccctgcattgcaggggcagtgtgcaggagcacagtttccctgctgccactggggctgccagtccaggtttgagagcacactggggacaggcgtctctgctataccttctcccgccaggcctagccatgcagccagcaggcctggttgtggaaaagaggggttgagaaaaattctagagatgggccatttgctggtgaggagaaggtggagcaggttcaagaacttggggttttcctgtagcttaatcctggctgcccatatggggccagtgagttctgggtcaaggagtgctgaggtgaggagggggacctggaagctggccccgcagccctagatgttgcatctcacccttgtcacatagtgtggcttctgggaggaagccagagagctctccagaagggacttggccaacctttgatcaggaaaacacctactccctaaagaggacaacaccggggaaggggcgtcagtgcctcacctctgaccccgttaggagcccaggcaggcttcccctgcatctgctccctgccctccatcctctcctgggaagaccaatccccttatagatcaggatattcaatatccacagttccctcttgttcctgctttagccacaatgagcaagaggaaaaccccgttgctggcaagcagcagtgtctcaccggccatcttgacagttagggtccggcgtggggatcagccgctccctggctgatggggtgaaatgaaggcctgctgggggctgcggggaggtagactgagtgggcaggaaacagcctcagcccaggcaggccccgggcagcccaggctggaatcttccacggatggaggggaggctgatgccaggagatcctctgggcactcctcacctctccctccagggcctgggtccaccccccagccctgccctgccctgcctggcctgcttctctgggacttcacccacattcatcctatcctcactctgggggtcagatggttctaagcaggggcaatgtggacctcaggcctcagctgctgtgacactcactcctaagaccctaagaatctgccatgaagttaccccgttcctcctcagggaatcagtatgggggctctgcctgaaagaccaccaaccccaccgcccactgactctctgccccaacgattccacctcccctaggccctggtcagccacatgccctctgagccactctgcccacttctctagttcctgccacgaagccctgatttctgccggctttttgcacaatgcccccggtaatgtgccaggaagctgtgctgtgtgacagagcacaggctccactcacagctctgctattgggaacccccctccccatttgtgagatggggctcaaggatgcctcacagaagtgccaggattgagtgaggtgcacctgcgagccacccacccctgtgcctggcatgtggcaggtgctcagccagtgttcacttccttcctcttcactgactccatgttaccctgatgtcaacttctaccctgagcagcacctgaccctcttgttcaggtgctgtccaagcaccttctcagctcttgctccccaccctataccaagggctctgcagaagctgcccacacaggagccttactggcccaggggcaggtatagggagctcatttactcaaagttcccctcacctccccaggctctcagtgttgcagagatggaatgaatccctaacctcatgggcactccactctcagcagcacaaaatccgtgttccagacccttgcatggcagcgtatgcctgccctagtctctggagagaaagtgacttcggccctgaccacactcacatgcacacacatgtgtacacaagtgcccatgtgtttgcacacactcacatgcactgcatgacaccagggaggactctggattctgggctctgctgttgatgctgtctttaggagtcacatcttagagaggacaaagaaagaaatcccagctttagtcttgcagctaaactgtagagacctgagcctttcctcctgagtccctgtattctgcgactatctcctcttctcattttctccacctggcctggctctcctgccctccacgacccccacctccttctgctgcccaaaccctcttctgctggtctcctctctgctgggtctcatctgggaggagtttggggcaggagccacttttctcattctccttattgatcattcttccactccagtggaggcctgcagaagccaggtaacttcctcctatgctggggccagagggcagtggggcacgtgtgcatggtggggctctgagacagaggggcagagagtgggcatgcagaagtgtgtgcatgtggggccagtacatgcagccttaccccaagagtgtttttaaatcggtttccacagcccctagagagctagaaaatcctctgctgcctcccttctccaggctgagccccagagttgcagcagctcccaaagctgctcagatgagccggggcagctgggcgcactaggattttgtgcttgagacacattcctcctcctctgctgtgagctcttctccgcttagtagtctcagctgatgtgggcagccgaggcctggctgatgttaacacctttgaattacagactgacctgcttgcccaacgtaaaggttagctggccagtgctggactgcagctgtgctgtgtctaggccttcaggtcttgagccatcagggtatgcagtcaagtctacctgggcaaggcctgtgccagaacagggtgtgaggagaggaataatttgctaattgttattcactttcctgtcttcatcctcattgccacagcactgggaaagcattgagagaacattccagaaaagttttctagaagcctccctaaagtgagataggagcgccgtttttccctgctctgagccctggagtggtagctcacttactgccccacctacacccctagagctgcccccaaccacccgtgtgcactccatagcaggacccccagccctgcctcaccctcacagagcaggcttagcccactgttcccctagaggcccccagagcctgggagctcccaccccattggaggggagcaggggagcaggggagccgatgggcagaggagcagggtggcccaggccgggagggtggccaggctcatctaaccctgtgttccctgaggaagctgcgacccacattgtggaatcaccagatcttagcctggtaggggcgatgagctgaggccctgaggtatcagagcttggggttggaatagtggccacccaggcccagcactgtgggcccctcccctctcccccaaggcagaacccagggccatgggacccctaccctgcagacctaggcttgctaccgtgcgaagctgtggggtgagaggtctgtgggacaaggaggcccctggggagcgtgcaggtccgtggggccggggctgaggccagtgtctctggtccacagcccctcacacgtgtccccttgtctcctcatttcttccccctactcagcaaaggcagagagaagaccaagggaggcagagatgacgagcacaagtaggtgtcccaggcgaaggcagacgtggcagcgtctctggggagacagaggcctcctccccacaggctgtggagggcgggatgggctcggctgagagggctcaggagtgggctgtcgtggtggagctggcacgggtcatggaggcccagggaggccttttcacctggccacgggggtgagggacgaggaggggttagggtcgggggggaggtggccagaccttctggtttccactctgggctctcgggggtgaccatcctcctctctgtgtcttgttcctcctccactgttcagcccccatcctgtggccttcgggcttccctgggagggaggggacagctaaaggctaaggggagaggggcacgaggacctcagggacccctctcccaacaggggcgaggtagggccaggcagctggaggcataaggaggaggaactctgggtaccctttgcagctgcaggtcgtgggtggagttggagacccccaggaagcttaggagaggccaccatttgggcagccctctgtatcttcatctccccaaaaggcttcctggaaaaatgaggtcagggtgctgtctggagaggacaggagaagggtcctgcaggtgggaggggcttgtcacaagggtctggaaagattcgaaggctgggggttgtgaatgggtcttgtaggcacccctagaagcacactgacatctggaggactctagcattacgggatctcataagggcagtggtagccaaggtggaccatactggaggaggcccctggttaacacctgctcttacagatgacaaatctgtctcagaacaggggcagagctggaaccagaagacagagaagctgacttctgacccagagctcaccatagacccaggaaatttagagaacttgactgtatctaaatttaatctaattctccaaacataccaatgagagctgaaaagccacgagtgtggtcttttttatcttccagataagcaacctgagccccagagatcttaagagatttgctcaaaactgtggcctcaatatattaagaattagttcatctgaagatatcatggaaatatcaggattgtgtgttgaggggtctgaactgatcaacactggtgtgggcttgggatatccactggcattaagatcctggggaactcacagcctcattcattgcttcaaaaaaaggtatgagttctaactcgcatttgttacgcacaagcaaaagcaatgatgatgcagtgttaactctgtagtgatggaggaaatggcgctgtgtaggaagagctccagcccagagacctgaaggatggaggagtttgccaggttcccagtaagggaagacacgtaggcagagcatgtgtcaaggctcagagccagggaactgaatccagggtgggtggcgatgatggggaatgctgagctggggagtcctcttagggagtcctcaagggttcaggtttctccatagatgcttagatgtaaagggcatatgaatgagatacgagcagcctgtccatccccagcttctctgcctgagatcagcgatgctctaaggcccttcttgatgcccagcttcccagtctgtcccaggccagacccacagggacacagactggcctgatccctttgactggctacagttggagtaagaggtacctcacagtgccagcacatagtaggtccaccaaaatactggttccctagcacttctctgtcctaatttcttaccatctctaattagcacatgagataaagtaaactggcatatagtattgttattattattatgtgtagagcaataggactattgaaagaataggaaaatgagatttctaagaagagattgaacaaatttaaactctttagcctggaggagagaaaactgtggagacagatttcaatctctgaaatgttaatgtgtggcaaagctggctggtatctatctccactgagaggagataaatggaaataaatttaagttgaagttaagttgaagtagagaaacaagattcaactcacgaaagaactcatagtgtgtgacattctgggataggctggtttggggagatgagaaaacacccatcatcttccatgatgctgcttgcttgagccttgcaaagggctgggccgccagcaagaactgaagagtcagcttccctgacaatcctggggtcaggacaagtgtgtgtgggtcccccaagccttctggtacaacgtgggcacatgtgcaaacgggccagtttggagacagggtggttctagtataaagggtcagcctatcctgcccacctacggaaagctattcaaaaactaactgaaattcaacgcactttcaaagacacctgtaaagactgaaattatgaaattccctgtgccttggggcatggaaaattttttaaataaacccatttaggggcgcttggataacatgctccgaggttttgaaaattgggctgtttgagcaatgcaaagaaggaccacagaccctatttctcatagataggagtctttatcctgattgattacctgaggcctgagctaatgagcctagtagttccagttgaagccagtcatggggcagaagccctgggcagtgaatggactcaacctgcagctcatttatggtcaggtctctattagctttcagaataatccagagacctgaattaatgaaacactcgggtcactaaatttagtttggtgaatgttcccaagtcattatgaatactaagctctacctaggaccctgtgtgcaccacacagcaacacccttctaaatctgggccataaaatgagcgaagaaatcatcagatttatagtttacaataagtgaactaattttagcattttttcctctagagataaataccagtctagattgtaggtgcatttcattctgaccatggtgaatgcagccacgggaaactcaaacggattctaaatcctcagagggtgctgggatactggcctccccttggctctcacttctcaagctttaatacgcccaagaataacgagccatttgattgtaaagtgagttttcactgagttgattattggcttgttttctttgtctgtttctcaccatatcctgtttttggtaattgtagaactcaactagaccaaatgcagaattttgctttgaaaacaaaaaaaggccaggacaacagacacctcaacagcaaattacattttttgaaatctaagtctttcagacaaatagataatcttcaaaattccctgattaagttgacatttatttcaaaactctcctttacagtttgccaagagaagtaggcatactgctttctgagaactggtgctgcaatcaggcagaaagggctttttctatagtgaacttctgatgtgttactgatcagaaaattacaaaggccagtggcagtgatgacatcatgctgtactgatcacaattcagattcattgaaaagcaagtctaggagaatcagaggtacagagcctgtagtaagaattctggaaattacatccttcactacacatttctgcatttttaataaagggacaaagacaatatccttttgagatattcccaggcacacaggagtgctaccagtactaccacttcagacagctaaaattatgcagggttggaagggagagatttctcctttcaattgcttcaaggtgtagtagagatagttggacaagtatagtttttgtttgtgtgtttgtttgagacagagtctcactctgtcacccaggctggagtgcagtggtgcgatcttggctcactgcaacctccgcctcctgggttcaagcgattctcctgcctcagcctcccgagtaactgggatttcaggcatgtgccaccacacccagctaattttagtagagacggggtttcaccatgttgaccaggctggtgttgaactcctgacctcaagtgatccacctgcctcggcctcccaaagtgctgggattacaggtgtgagtcaccgcaccggaccaggacaagtatagttttttaaagcctcaatcatttctttcaaatctgtttgtgttaagaaataaagtgactttcaaattcaagggccataagtgccccagggatgcctcaggtccttttccacctgggtgagtccatgggaccagcctctgaaagccaccatttcttgctaccttgcactccccccgggactcaggcagcagggccagatcccatcccagcaggccaggcagccggcttctccaggcagggcctgcttctaacctaccatctcagagcacttcccctctggggaagtggggaaggggcaggggagagggaagtctgtggctggagcaggctgcaatggcaaaggctaactatgtaggtcacacatggggaagggccaaggactccaagaataacacagcctaggaatggccaagaagtaatggtacaaagtcaaacgctgagccctgcaggagactcctgggtaattcaggagagagacatagttgagcagcaaggctgggcaaaaaggaatcccaagcactgagacaggaaggcccacaaaaactacacttctgaagctgggcctatggcagggtcaggacagccagcacccctgtccttggggccagcaggtggggcgaaatcccacaggatgcttcagggcaagccagccagggtggtcctttccccaccatcacacgattatttctggtgggttcattgatctgttcaatgttatgtcaccagcaatttaacatgcacagcagtcccttcccaaatgtttgggtgctcaggttctttttgaatgagccccttctttgtaaacatgggtatgatctgtgagattccacagatgacagcatcctgatctgtaaactatgctggcacacagaccatatctgtacctatgggtgccagccctggggccttttagctaaaatcccaaatggtcaggaatggatgggattcttgcccacagaaaaatgcagtcctacggcatcgaggcaaaggacccgagatgcagtaaaaatattgctggcctagaacacaggagctttctgcttcaatcccagttctgccactcaccgtgtgacctcgtgattattttcccctctctgagcctcagtctttttattggttgaatgaggagaagtatgtggccctcagaggattgccaggaagatgaaatgagcagacattgcagacatctggaaaggcctttggccctacgtagtctctttttggcctgtatgtgtgtgtgtgtgtgtaactcacctcccccatcagaagggaggaagcttttaaaaataattccaaaggcatcagctttgattttagagcctctttctttccctttcttctcattgtcgtatttcagatggtatgctactgaagagtgcagacacatcagccttcttccattcctttttaggaattcaaagaacacgctaatgttccctaaattgtgagctgctgccacgtgaaaagggtgattctcaattgctccctcactgggatatgaacgtgctttgtcctgcatatgaacagtaaagaaaggtcctggggttgggatagggccaggtttggggaataagattggctccacaatcctgaggagaggggcttgaggtttctaggtcatctgcctgaggacagaaaggttttccccaacctcctattgcccggcataaagaacaaggatctggggtcttagaaaccatagtcaagcctccacagggagatgtgtgacccaaaaagggtggactctgctgtaagtgagctccaggttggagcctacacctggctccacctggacctacaggatgatggagccatacccaggaggagggagaatgggaagtggagagagtcaggtatccactcatgcaatatggatggggtaatggaacactgcactttaccctctgctgatcctgctcctggggcttcctggcgccaggaaccacaggctcggctgcagggacatcactgaagggcagtgaggacccctgccccttttcctcagcccccctgactgcaaggcccttcacctgggggcacaaggtcgcagcaagccagaggaagaggtaggaactatggagcctgccataagttcctggggttgggggaaaggggaattcggcagtgagaggggacaggtagaaggggcaaactccaggaccggagatagatgggaaagggcctatctccccctttttcatggggaccaaggaggatcccagaacacggagaggttggagaaagacaagtcaggctttgagcaccagggccatctgagaactgaacagctcgtttcaaccacatctcccatctcctcatcggcctctgcccctgagtcctctctggtccctgccccgccgttctgatgctctgtctccagtcctcgggctttctctccaaccagctgagccagggaggatgagcgtggggacactggcagggctcagggctctgaggagactagactgaggggctgggatcagaccgaaaagtccaagacccagaggagctccagttaaaacggctctttccggctcaagaccacgttccctgcttgctggggaccccatccctctcctccgtgtgtgaaaggatggcaaaggcggaagtggaggggtctctcactgccctgattccccctcctggctcccaatttgggaagacagatcccgatctgtctcgggaccagtaggtgaggggccgggtccatctcccttctctgatgtgttctctcatgtttggctcttctgtgtttgtgtgttttcctccatgcgtccctctccctgcacctcattctggtggcccccctcacagagccgggaggagcgtgttctccgccatgaagctcggcaaaaaccggtctcacaaggaggagccccaaagaccaggtaggacaggtgccgcgtcagccccgcagccccgcgcctcgcggcgccctcccgccgcttgccagcccctgcccggctgccaaaaggccctcctgggataggtcgtccagagccatctgtgaggggcctggactctcattggctggcccagggctaggccccgcccagtgatgcgtggccctccaggaaggagacgccctggggccgagggagggaaacgggcagcgccctctgtcgggtgggcctagttacaaggctcgtcccgccctcgttgctcccggttcttccttcttcacgcagaagcccagagttttaattagagcagagaatatccatccatcaagaaacgctgtttggccaactccctatttctagggggaaaccgtcgtcccactagtgcggggtcggcggcaggcctcgcccgcgcgctctcaccaggctgcagcctggcctttggggaggtcctggggccgctggagggcgcggcagggcccggcctgggaggctggagcagcaggtggcactgcgccctcccggaggagcgactggagaggggaagacagctgctgcagaggaggcgggaggcctggaggaagacaaggggagaaatggagaggacaggggagctgggagggggccatcttctccatcacgggcccaccatcggggctcccggctgccctcccccagcatcccctctgtggcccactggccctcaggctctctctcccaccctcttgcccccatgccaattccagccgtgcccttcaccttcttaaatggagagagtacagctgctggctgagaaccaaacccagcatccttgggtggctgttcggaatccacatgtctgcatctcattagatgaatacacaccaatgcattaggttctgaattccatcagctatttgatatggataagttacttcctaagccttcgtttctgtacctgtgacatgagaataacgcccatcttggcagggcacagctctaaggactagagatactcatgtaaagtggtgttgtgcctggaacagagtatccacccaacaaatggtagctatttattgagaagtgcaaaagtatgaattctttattccctaccttcttccataagagatattcagtgcctaagtaagtggtatacaataaaagagcattcaattaaaataaaaaggcaagaccagacgtaatggccattcaaatccaagatcgggattaggtagaaaaacactgcagttattcaggccataacattctaagcggtagcaactaagtaaacctcaaatttaactctcagctttctggatgccagagtaaaaggagaaacagtcactatctcaccatcagtcagcccacctaaccagtctttcatcttccccagatgaaccggcggtgctggagatggaagaccttgaccatctggccattcggctaggggatggactggatcccgactcggtgtctctagcctcagtcacagctctcaccactaatgtctccaacaagcggtgagtggacgggagccccgcaaccccagctgcccccaccctgtcaggcaggacctggcttgccatgattggaatttgggtagggaagagtcagggctcatggacggctccttcctaacccaaccttacccttttctgcttttccttgggtgtttttctcacctctctccctgcaaaagcagagcacagcagctgcaggcctgttctcaggtccttgaatacctcccagcccaaggaagccacagacctgcccaccccatatttgaacctattgaccccatgtctgtctctctgttacttctgcctttgattagttctctgtgttgaggcctctgaaggcaactaatcctcactattcttggcagggcttgatgtttaaagaccatgcttctgtccctctgcccactcccaggtctaaccactgccagtgtcctcctcccccagaagcagtccccataccccaggcctgatggtacattctcttcctcagatctaagccagacattaagatggagccaagtgctgggcggcccatggattaccaggtaggtgggcacctggaggcctcatgtctttcagactctgctgtagtgggggattctagccggatgtgcattatccactatactgaggcatggatccagggtcatagagaaccacaagctgaatataagttcccaaagtaagcttgttcctgggaggcattcctagcagtatcatcagtagagtgatacaaacccaaagaaaagcttgagaactctgcctatgctaatcaaagcccttccagtatttcatgttcagtattggacttcataaagtgagaagcacctagaaaaaccataaggagaccaagaactacaaaaaagtattcaaacagttaagataagttaagaaagttttcctggcatgatttttaaattgttgttttgtattatttgattgctggaagtaatgtcgattctggttatctctggatggtgagactgtgagtgattttttttcttctttttgcttctctgtattttctgagattaacacaacttttttatttgtgtgcttctaagaccagagacaaaagactgagacaaagagaggttgacagctgtaagaatgtgaatgtggccaacagtgcaggcaggacaggtgatgagcatgtctggtggctgctgggacaccatctctcaggaagggcccagggaccctccattgctccagaccctcccttggaggctaacaagactcagctataaatcagaagactgttgggctttcctaggattgagttagaatgctggctgctcagaggggacagggcttgcgagagatctcacctggctgccactgcacttctgtcctggggatgttcggtctgggtatcagcaccaggccccagaatcagagtgagccccatctaccagggtagagctttatctttgatgcctagttccagaccccaagcacaccaacccttctttacggacaaccccacctcccctcactcaggtgatgatggaaaggataagatggcacttttctatgtaaaaggtacatctggccatgttttctccagaatatacttcatctcccttcatctttgttttagttagtttccatctactcaggcaactgtcttcccaggtgcctgaaaaacagccccaggcaatgtcaaacggacctgcccctgtggttttaaataacttcaagccattggattccttagcggtttgagaatcccggcccctcacctctgccaaaacccaaacgcaaagtgtcctgagacttccgagggcttttccaagggattgggctcagggctttgtttctctgtgtgctgagaactggagaattccaaagaacaacgaccccaactcaggtatcatgtcactggcctaagaggtaaggacacatcaaaaatagagtcattattgttcatggaacttatttttgaaggtttattctatgccaggcactgtgctaggagctatatatgtatttccattgtagttaatgtaattattcaaccacccaaatataggtgttactgcatttataggtaagaaagtgaggccccaggaaggtcaggagcttgtcccaggtcgttgccactaagttagccaaggctagagccagggttcaaggccaggggtgtctggccatagccataagagcaattgatttctatatatcaagccttctagacagctgctcccttcaggtccctggttcatcttcatcttgctacttagtgcttgttttccaaaccttttcaaactgcttcctaccagagacttttattgactgaaccagacattgtcccctccaaagactttttaaaccgaactgaacaaaacggttgttgtatttaacctggtagcatagtgtttcccgacaagttcattcacaattaaccttgcaaacatttgagtgagagctatgaggatgcaaatgtgaaattattttcacttccaatacatacagtgtataatgcaataaaaccaagccgggtgcagtggctcatgcctgtaatcccagcactttcggaggccgagatgagtggattgcaagaccagcctggccaacatggtgaaaccccgtctctactaaaaatacaaaaattagccaggcatggtggtggcgcatacctgtaatcccagctacttgggaggctgaggcaggagaatcacttgaacccagaaagtggaggttgtagtgagtcgagactgcaccactgcactccaacctgggcaacagagggagaccttgtctcaaaagaaaattaaaaataaataaattaataataaaaagcaataaaaccagatacgacttcactctcttggagactttgggtttgatgagttataaagacctcaggaaggacacctcgttggtgagatgtggggagacttagctgaactcagatccaggaagggttgtgagggctcaggaccattctaaaggttatggcactgaaagaagcctggaggtaaaaggaccgcggcgtacccatgctctttgtttcttccatttagaatgcatgtcacgtgtaaactctttcctgattattgccatctccaaggcaagaaaccacagtcacccccctgtgaatgtgcagtttccccaccagagtgagcaacgcttggcacttggcagagatgtttttggtggatcaagcggtcttgagtctcttcattaccatctcttcctggcaccaagacttaatacattgtcacccaacatctctccagttttcacctccatttcatgcccctgccactgacctgaggtccccagcctcaattgcatgcttgtacctactttctacctggtctccctgccctcatattgcctcctccactccaacctccatgccaccactggagcaaacttctgaaaatgcaaatctggtcatgtcacatctctgccacctggaaaagtggggagtgggtaatggatgttgcagaaggacagtactaaagggcgcaccaactctcatctctggctcccagcagatgttcctgaagctggatcaggtccctgggaagcaggtcacaaagcatcattactctcgggttttcccaggacaggggtatagatttaccactcagcattattacttgtgatcgctttcatgaagccactgggaggtgtgtcccttatcttgaaaggagatggtggaatagtcagctggtcagttggtcccagctgtggctccgtttgcctcttcatcttccaccctggaaaaattgagtcctctgctgatgattggagagaaggatggccaagcccctccccgagaaccctggagaatgaccagctgttttttattttttatttcaagtgcatcatttccccttcctagagccccaggaggggtgggaggcagcaggaatggcattccccttcccccaacaccatgcacgtggtggtctttctccagcgccctcagcttcctctcggggctgcccttcaaccagcagtgagcaccctctggagcttctcttccctccgttgctccttcaagcctctggccaccttcccctccaccctccgcctctactgccagagcttctgcccaggttgtcaccttcactgcctctgctacatggaggaagggagaaacgtatgaggcctgaaaagggggacagggagaagtagcctgtcttatggccatgcctcgagatggaaaacataaaaaccaaccactctcttggcagtgggaagaggacttgctgctggcttatcttcggtagatgccaaaaccatgtctgtccgcttcccagtcctgagttatagaaagccttttttattgttggtgggggcattagttgtggaaaaattcatggggtttttaaaaatctttggcaaaaaagggttcttggaagttaaaactctataaactattgtgcaaagaaggacttctagtgtccgtttgctctcttcacagtaaacttctcagagctaagttagttagtcctatttcctttttagctccctgaaggagcagtgaatattgaacttctgtgaagctccagattctaagcttttacttccgtccctttggcacttcacgttccaaacggaaatgtttgcttcctagttcaagtgtcacttcatttgtaaatatcccctttcctggcaatgttctcattaacattggaatttctatttccttaacatgattacttctgatgtgtagatttttaattgccctcaggttatttttcagactttgatggacactggatgatcattttagtggttattctttttcatggaaagggaagataattctctcaagtaaagtcgtatttagaagttgcatcaaagcacaactaaaatatgaaatctccaagatgacaggcatgaaaagcaaccttcggagtcgcattagaagaatgtgccgggctcagtggctcacgcctgtaattccagcactttgggaagccgaggcaggtggatcacgagggagattgagaccatcccagccaacatggtgaaacctcgtctctactaaaaatacaaaaattagccatgcggtggcaggcgcctataatcccagctacttgggaggctgagtctggagaatagcttgaacccgggaggtggaggttgcagtgagcctagatcgtgccactgcactccagcctgggcaacagagtgagactctgtctccaaaaaaaaaaaaaaaaaaaaagaagaagaatgtactgaggtccatgcttattctagctggggaaaggcttttcttgttaaaacacacgtttgagagaggcaagtgaatcaatcattctaagtatcatgcacaagctccctacttgagagatcaaccgcttagctgaagggagattctgttggggtcactcacattttatagagctttctgctgtttaggatgcattttgacacacatgatctcatttaacctgcatacaaccttacaggtagctggtgtctctgcttgtaactgaaaaacacaaggctatgtggtcatttgccctcacacctggcaacatgtcaggtctggggttcaatcccaagttcagcaacccccagtacatgcctctgtctatcttaccatggccaccctgacaggaactgacacctccaaatccaaatgagacctgatggcttaaaatgagcgttcgggaaaagtagtagtgacgtcaaaaattactggtgctctggctctctctctctctgtctctctctctgtccttatatctttttagcttaaaaagccaataatcggctggtcacagtggctcgtgcctgcattcccagcactttgggaggccaaggcaggcagatcacctgaggtcaggagttcaagaccagcctggccaacatggtaaaacccaatctctactaaaaaaaaaatacaaaaattagccaggcggggtggcatatgcttgtaatcccagctacttgggaggctggggcagaagaatcgcctgaacccaggaggtggaggctgcagtgagctgagatcatgccactgcactccaggcctgaatgacagagagagactcagtgtgaaggaaaaaaaaaaaaaaaagccattaatcatttgtggtaagctccacaaggaagaatttgttgcaatcccacctgtgcctggctccagcaggtttccaggaaacatttgttgcatgaatgaacaactgaaatagggcttcccaggatataagtaagattgcagagctggacgccacataaaggacacagcagagtgcacacaacatacaatcagtaggctgaaaaaggcggctcaggcaggcaccaaagccgcactggccatacaaacaaagaaattcagcaaacggagaggaggtagcaatgtggaaagggggggagccaaattccagaaatgcaaagacatatcagaggcctgcaggcttacatgagaattcctcaagcaggaaattaaatgcaagttaatgaaaactttgaaagctttattcctgagtgcatgaaacctgtgacatgggtttggcagctctttctgaagcagagccatcgacgctggggaagaacgcagggcacttggcatcacctaggagctttaaaaatacagattccaggctgggcacggtggctcatgcctgtaattccagcactttgggaggccgaggcagacagatcacttgaggccgggagtttgagaacagcctggccaacatggcaaaaccccatctgtataaaaaatacaaaaattagcccggtgtggtagtgcatgcctgtaatcccagctactcaggaggctgaggcaaaagaatcacttgaacccaggaggcagagggttgcagtgagccgagatcatgccactgcactccagcctgggcaacagagtaagactccatcaaaaaaataaaaatacagatgcctgagctgcatgtccaggattggattggattggtctggaggtggcctgggcatcagtgtttttaatgcctctccctcccttcggcccagcaagttaagtctagtgaacactgacttagaggttagccaactcatactcctctataaatgaagacactgaggcatagaaggagaaagagccaggatcacccagcagatgagaggcagtggtcagaatggagcccaggaggccagtgctggctcccgggccctccctctgaccctgctgccccagcccctggacccctgcgggaccaggctcctaggctcaggcagctttccttctggctcccccttctcctgcctgcaggtcagcatcacggtgatcgaggcccggcagctggtgggcttgaacatggaccctgtggtgtgcgtggaggtgggtgacgacaagaagtacacgtccatgaaggagtccactaactgcccctattacaacgaggtcagtggccctgtggggaaaggagcctctgtaaatatggcaggagggtggccccagccctccccaggagaaataggagtggctggaagtcaaggagcacacagggctaccagcaggggtgatccaccctgttacaacccccaggacactgacaaacagagccacatcctctgaatcctctgaacaccccagtctagagcacaggccgacactggtctttgaagcgtacaccacccgggtgctcctgtgcagaccccagcagtgcctgtgaaagaacccccccccccaccccactccccaagaggcctggttcccactgtttcccaggccagagcccaaggacagggctgcctcattccaacccatggtggcactggcaccattagtaagcactttctaccagccaggcatgctcctaaatgcttctgaactggaccatccaaagttgtcactatcaattcccttttacacaaggggacagtgagacttctgaaggcagaccttgtccaacctcacagtgccagcatcgcccttggcgtgctagtggggttctgccctcttggctcggctccttcatggttgcctaaacttctgcgggcttctctccagagcactggccttgattttggggtgtgaaagagaaaacatttggtacccactcctattctttccagccatttgaggccacatcaagggtgagggacctcagagaccttctactttaatctccccatcttacagaggaggatactgaggcctccatatggaagggccttgcccacaatctcagagagtgttgctgatagagcaggggccaggctgcccacccagcttccagcccagggctctggccaccatcacaaatatggcaccttggttcccaggctccaaatgggaccccatcataatcagctctgaggagggatgtgagaaatagagaaatacactcactcatcaaaacccaaagaatggacttagaggcatgaagaacagcgaaagtgagacttttaataacggtcttgcaagatggagtgtctggtaggcaggcacacctggggcagtcacaacaggaatttatctcctagtgtgcaagtccctcccccagttccccattggtcgagtactatggggttacaatcttccctgacgtcgcctaagtttcattttccccgttataaggttataccccgctccccttcgatttccccacttaagtttcgatttcccaataacaaaactttcttccctttcatgggctgacccctcctctacattctgttcgcttattgtgtccttctaggtgcatgagccgtgtggtttgttacattcgcaggttggatgccagtacttagacttatcctgccttgaaaatggaccatttaaaatgttttctcaccaggatgcccaggcctttcccagatgcctgatcacacatcagactaacccagaagccacaggcctgggccctgccatccctttcccggagggttccccagtctgtttctcctggtggctccaggcagtgaggggtgccaggctggcccaagtaaggcagctgagtcccgtaccctgaggtgggtgagggctgaggtgccccctgtagcttgggggagggcatttctcaggcacctctgagagtcctcagactgtgcacctgcaggaagaaaacccaggcccacctctgcccttcagcccaggcctggccgaactctcctttgtgaccacacattgactctgctgtcccagctgctttcccacaggccccccgagctggacaacctgctcaggacccctccagccccaaggacattcaggattgacatctctggccttacgttaggacacatcctgactggacaagcctccgcctagataagcatctatgtccccaagacaggcatggagacaggtccctgtggcccctgtggttacttgatagcagtgaagccacttttgctaacttaagggatctccctccaccaggcccacacaccttggctttcattcaaattacttcctctttcccaagggcacagagctgctctctctactctgtggctcccccagaaaactcctactcacccggcagggcccagctcaaatgttcttgctactgagcagccttgcctgctctgtctgggtcagaggtcagcactcccctttctctgcagtgttaatgtcctggagttgaggttggtcctccgtgtctctgtcctgctggtggactggaggctcccagtctcctgcctcgctatttgttcagagccaggcatgtactcggaggggttcagtaacactcacccaaaggaagacacaaacaaccactgagcatctgccgcacaccagacagtggcacgtggggcaacatggaggctgccgagatgaaggaggcacagtttccgccctgcgcaggtcccctccttgtttcagcctagaatctttctaaattccctatttacttcctctaagactgactattcattctgctcatctttggacaatcttaaatgtgtttctgatcacatttttgttctttttcacaaacccaaatagctctgattttgtttctgtttcctctaaactagggtttctcaaactcagcactatggtatttggactggataattgtggtgggattgtcctgtgctgtgtaggatgtgagcagcatccctggcctctacccagtagatgccaatagcaactccccttagttacagctaccaagactgtttccagacatgccaaatgtcccctgaaatcgccctcagttgagaccaccattctaaactatcttactatgattccttccagccccaaatcagcctttccagccccaaagctttgtttcccttttcttctctttctatgccacattccttttcaatgaaggacctcctcctcgtcatgggaatgtattatttctgactaattatctgagctggtaggaaccttcctttggctccattaaaacaagagggaggtgggaacaatcaacatgacttaggtatctaagctattacaaaaggaaaatatgctcaggaaataacaggaatttgattgcagacagctcagagagttcgggattctggctctagctcagctagctcgctcccctggggctggcacatctgcgggcacctggcctgatcaccctgcctggccctgagcctgcctgtgtgcagggaagctcaaaacctttgcccttctggaacaagctggccattcacaaaccagactaaggctcctttcctgtgtgtcctgtgtgtgcatctggccccgccctgggcatcttgggagcgccaccatccttcctcctgttgaaaatccacctctcccctttgccttggatccttctctttctacagctcaaagaacctggcattgcacagcccaactctgtctttgtttttcttccagccccttcttccttgcctataaggtgttctactccagcatatgctaagtacaaccatgaagacccatgtgtgctcaaggacaggaactaggagtctgtcacctctctctgggcctttcctcattaccacacactgctccagtgacctcctttttccctccacccctccacagtcagaccacttgggttgtcctcacttcctcccccccagtcacccctcaatctctgcagggtttctgcctccagatgtcattgacactgctctcctcaaggtcaccaaggacattgctgttcctgagtataatgtccatgtcatcctcctctcccttgatcacccagtttctttcatcccgctgcctgctgctcctcttgggggcccctcacccactctcctgcttcccctgtctctccagctccatctccccggcctgacttcttggctgaaaggctgtgtcttcttggagccctgacctgggcctgcttcccctcccatgctctccccaggtatcttctccatctccaaggtgtcagttaccatcttgtgctgacgattcccaaatccatatccccacctgcctccccagagcttcagaactccggccagcacaccctgggcctgttagtgtcatgcacaactgtcgctgcttgctatgtgcttaccatggtgcacacctgcgttaaagacttgaccagggtgtctcattgcaacttcacaaccacaccttgaagccccccaagtgaatggcacccctggagcagttcagcatgacagccctggatcatatctccaaattcatagtataataggtaaactgaggctcaggcaagaaagtgagtgatctagcagtaacagccaggtggggctggctctgaagctggttttaccctcagtgctcaagggccagcccccagcagccaggagcacgttctcttcggacatttaccccaagcacatcggaaatatttctcccttctcccccaccacagttcaccaaagcagcagcccctctactcactgccccacaccctcatcctcagcacctgcacacccaggccaggggaagagatggggactgcaaatgtgcatggcagcccacagcaccaaaggacagtgcacgcccatggcatttcacattgactgccaactaagtgcttggcacaccatggttcatctgctctgaggcttgcgttattttgcagtttcacctctctgaatttgggatgtgtctcctaggcagccttgtggcttcatggcaatgtccatgtggcttattaaaccgtagtatatcttacagccagtagccactttagatttggtaaaatatgttacactgtctcatcagagcctcataacaagactctgaggtgggtgtcattatccccatttcacagctcaaaaaactgaggttcagagaatgtgttgctcaaggccacacagttaagaaggtgcagagcggggactaaaacccaggtctccttgctccctggccctgtacctcttctgagcacagtacaagggcatgggctgtcccacctactgttccaagttcctttcccaccccacactagccagcgccagccccacctaggggatggggctctgcttcctaccacccaccaccagggtcaatcaggatcagatgagttgcctctgctgctcctctgaactttggggctcagggcaaatgtctggggtgtagacaggccctgcgaggagggaggggcccaacactgcctgggctgtcgctgctgccctcagtgacagcaggcctggatccttccccctccagtacttcgtcttcgacttccatgtctctccggatgtcatgtttgacaagatcatcaagatttcggtgagtggggagcagcccctggcaggcagggccactccctcaaacttcacctttgtgcagacttgagaggggtcccctctgtctagacccatgataaagaggcagcgccgtgcctggacacacggctgggcaagtagggacaggctggattctggcccccacccacccctttcattggatgcctctgaatagtgcattcgcccgtacacagtggccagcaagaaactggcgtgggcaggaggagctgatgctgagcctcagtgagccaccccactctgccaaacgccctcccacttcaccacaaacctcgggtcccaccactgccccatggaaagcctcaccctcgctgggcctgacgggtgggctgtggttctgcctgaaaggtgattcactccaagaacctgctgcgcagtggcaccctggtgggctccttcaaaatggacgtgggaaccgtgtactcgcagccaggtgagtacctgcgcatggccagtcagtcgaggtgtgcatggctcagggagcgtggtgcacggggcccttcccactgtggcagttcctgggaaaaggctggcaaggaccacagtctggcgactgttagtacacacagccatctggcctgcggagaagtggcgcacacagtctgtacacaaatgcagtgagcaactgcgcacccagtctggtgggttctcactcataattaggtgagtaactctgcacagagcctggaaggagcttcatcacacgctctggagtgcatggcaggctggtgcatcactggccacaggcaggctgaccagtagtggtagaggatgcagtgagggagacccgtcacagcctgcagagaggctgcgcccagactcctgcctcctgggctggcacctgctgagcagaaaagaacccctttccacccctcacaggaccctgccgtccccttttacagttgaggctcagagccagggcttgccccagccacacagctggccgggggtgaagtcaggctgtgtgtccccagagcctcactgagccacactatccaatctgaacgcggtgatgctggtcaatgccagctgtagtgcggcggcctctgagggactctggtctctgaaaacacttcttacaagagccccaggcttttgggcagccatgtgtgctccgtggcatcctgtagggtaacagcaatggtgttggcaagggaaccccaaggggtggcccagagggcttgtgaggtgggccaggcagaggaagtgcctcagcctgccagatgacagctcaccacgtgggcaggttagggaccaccctgtgtccctgaagtgaatgcactgctcagagtgctgtaatgaccccattaggcgctttgacggtgagaacataatttcacccaattgtcacattggaccctcacaaaacagtaatgtaggcagcagcatttcttcccattttgcagatgagataaatgaggctaagagaaatgaaggggcttagagataccactaaactagtaggttgaacaaattggcgatcgcttgtggttcaacctaagagacgtccagctggtgcacattacaactatgacttagaccagggaatctgagtccaaaaccaagattatacacataaaaatcacaagatcatagaacactcaagctgcccaagaactgaaaaacatctagtccagcctctgtgaagataaactgaagcccaaggtgatgaaggggtttgtccaccatctaggagtagcacccctgtctccagctcccaggccagtgcctttgccaccaccccacacatgccatagccctcagcggagggcagccctgctgaccatcagtgccatggggagcagggaagagtcggcctcctgccatgttgctttccaggaagcatgcatagccgtggactacttgcttggaatgactggcatccctgaggataagctcctcccagggctgagcagtggccccggtaccactggcaggcctgaggccgagagccaagagaaagtcagggggtggagaaaaaggcggagattagtctaatatggacctctgggcttctgggtagtaaagtcctggtgaggaaaccaccagggcatcagtaagtgccagatgttgggctaagctcactgtcccagcaggcctcaccctcacgaccccatataggcatcattcccatttcaccataaggaaactgaggctcagcaggcttaaacagctggtccagggccacattgtgagtaagcggcagaaacaggatgtgggctgaggtctccacttgggtaacctagctggagatttgctgctcctgctgaatccagccctgagcctggtgctctcctgtccctgggagggcaccaggcaccctgtcccagggataggagagcctgaagtcacatgggtcctggagttgagacctaatgtctttactctgatatctccagtttggcctgaacttcttgatgagtcgttagttccagccagggcattgttggacagcatgctcccagagacactcctgggtgctgctgggaagctttgggtggtgtcgatatctcttggaactggaaggggtttcccgagagaccctcttctcaccctggcaggaccacattttgtcatttgtaccaccagatgcaacatcaggaaactgtttactgtttgctactctctgttgggggtgaggacgggccatacactcatcctcatagatcatagaggaagtcaggggcatacactcatcctcatagatcataaaggaggtctgggatgcagcaacttccccagctgggctacccttgactggcaggtgtcagccctaggctgaagggaggtgaaatgatgtttcaggctggtaagcatatagctcaggatctcatgtggtccttgtatctctagcctgagatcacacagtattaggactagaagggcctcagaagtcatcagtcaagtgttaacctgatgtagggacccccacagcaccatctctgattggtcctgtaaccttgcttagtcctcccagaaatggggcactcactacttcttattttagatatcttcactttctttaggtcatctcaaaatctgtcaccctgtaaccttcacccactttcacaggtctctctttcaggacaaaaagaaaaatagactttaaatttgaagataaattttacattcctcctgaatcgtattctctttctttgctaaatgtccccaattcatctaaccatgcacacctctatacatctacccctgtatccatccatccactcacccacccatctacaaatccatccacccacctgtccacagatccacccactcatccatgtatccatccattcacccaccaatccatatatccattggtccacccacccacccatccatgaatccatccacccacccacccgcctgtctacagatccacccactcacccatatatccatccatccacccacccacccattgatatatctacccacccatctatccacagatccatccacctacccacccatccacagatccacccacccatatatccacccatccacccacccatccatatatctacccacccacctgtccacatgttaatggctccttctatccagtaatccattcaccatctgtccgtctatctctcagccggccaggcagctcaccacccctccctctgcccatttatgcacccattcattgagctttctgtccatctcctcatccgacacacatctgctctggtaagacctgaagctcctgagattcctgggacatggcccctccctggaggcctgccagcctggctgaggttctccagtgactcctcatccacgtgccttcctgccctctcaccttgcttgtccctctcttcagactctactgtggcattatcttttctgagacacaggtggcctggctattcccagaaaggccaacctctgcacacagcccctaacatctccgggagcccaccagggccacaggcttgcaggacgcaggcctgggctacggtagaaggtggaagaggagggagtgaaggagggaggtgctgagtccctgagagttcagtgcccacctaacatcccgggaagcagattcctaaggcacagtgatgcgcttccctttgcttgcccactgggcttaaagtaaacctgaaggggcaaatccttcctaaagcgcctccttccctgacatccgtcctttcctccacacagtcataggtcatgggacactgggatgagactgacaatccctgtctttaggagactctcagtctaaaatcagagccaaacaatacccagatcagcacagtgagatgggaggtgtgcatggagagcacagagaacaaacactaaagagcccaggatcaactcttccgaggaagtcagggagggctgcatggagaaggagaaacttgagcaaaatgagtagaagtttacaaattgaatagggagaaagacaggtggaggtggagagaacaggaatgagggcattccaagctcaaagagcagcagatgcaaaggcatggaggtataaaagggcatataaaaccgcaacacctgttcagcaaggaggaacacagggctgggtgggctcagcagagtgagtcagggagcactaaatcaggagcctgcaggccatgccttttgtcttcaccccaaggcactgggaagccccagaggggctgaagatggggagcaggagcatgagcctccacctgggaaggccctgtgtgcagctgtgtccttcacagctatgtgaaggctggctgactggggtggggccatagaagaggccacaggcagaaaaacccaattaggaggaggctgtcgtgcttccaagtcacaccactgatgggatatatgtccatgggcaggctgtgcacccactgccccagctccagaggacctcagactctatcacaccctgggctagggacaggcagagctgtggccccaggtcccgggactctagggaccaagacagcatttggttctgccaccccttggcctgccctgagcactgggagatgctctgggtgggggcgtctggtgcagtgcccacccctcatcattgcagagcaccagttccatcacaagtgggccatcctgtctgaccccgatgacatctcctcggggctgaagggctacgtgaagtgtgacgttgccgtggtgggcaaaggggacaacatcaagacgccccacaaggccaatgagaccgacgaagatgacattgaggggtgaggcccagctaccccagcccctggagtctgagccagcccttccttcccccagggagcccccggtgagggtttgctcagagcacctgccacccgtctccctcaccctgctctcactcactctcccaagcagccccactcttccgaggcagggcaggggcagggggtgatggaggatggctgagaataacagtcctttgacatcctttctgccagtgagaaacgggttgggaagagtcgatgctggcagaccagagccagcagctgctgggtcctgagtatagcagcaggaagtgctgggagagccaaggtttcttctggtgtgccaattccaggcagctgatagcagctgttgagaaatattctgtgaccttgtctggagtcagtgggtaaaagtgctgggatcaatgaatcctgtcttttgtgagctgggggagagagagtggctactgtgaagtttttgtctacgaaacaaaagataaggcacaaaactataaaacactgacaataatactaagatcatatcccaatgtacaatctacaaagcactcatatgttttagcgtgcttgagccgatcatattcttgggaggtgggtattattacagccacctcagcagtgaggaaacggcagctcagtgagatgggaagatttgcccagaatcccacaaggggcaagttccatgaacgcaagtgtctaatcctagccttgctccctcagctgtcccttagagactgtgccaggacccaggagtgtgtagatgccaggatgggggttggggacctggacctggtgaccatggccctggctgtatgtgctggcaggaacttgctgctccccgagggggtgccccccgaacgccagtgggcacggttctacgtgaaaatttaccgagcagaggggctgccccgtatgaacacaagcctcatggccaatgtaaagaaggctttcatcggtgaaaacaaggacctcgtggacccctacgtgcaagtcttctttgctggccagaaggtactggggtatgaggtacaggaggctggggctgggtgacaggtatcacaagggcaggctgatgggtgtggggcctggggcagctgggcaggtaagacaaggctggaaatcatgttggccagggacggacttagaggatcctcactgcctcctggagtccttagactgagagctgcgcagggggcatgagagggaggagaggctgggggtgtgggaagagtgaagacaagtccacacacaggcacgcacacacacatgcacccactcacacacgcacgcataccaactcacacacgcagacacgcacccactcacccgtgcacatgtgcacccacgaatacacacacacatgcacccactcacacacgcacacacacccactcacacatgcacccactcacacgcacacacacccattcacacatgcacacatgcacccactcacacacgcacgcatacccactcacccatgcacacattcacccacgaatacatacacacatgcacccactcacacgcacacatgcacccattaacacacgcacacatgcacccactcacacacgcacacatgcatccgctcacgcacacatgcacccactcacgcacacatgcacccactcatacacacacatgcatccactcacacatgcacgtgcacccactcacacatgcacccactcacacacgcacacatgcatctgctcacgcacacatgcacccgctcacgcacacatgcacccactcacgcacacatgcacccactcacacatgcacgcacacccactcacacatgcacacatgcacccactcacacacgcacacatgcgcccactcacacacacacacgcacccactcacacacacatgccacgccctcacccgtgctcccccttccaccagggcaagacttcagtgcagaagagcagctatgagcccctgtggaatgagcaggtcatctttacagacctcttccccccactctgcaaacgcatgaaggtgcagatccgagactcggacaaggtcaacgacgtggccatcggcacccacttcattgacctgcgcaagatttctaatgatggagacaaaggtcagcagcgggagacccggtgtgctggggggcagggagtggcctgaagggaaggaataggtgagatcccctctcttcacaccaccgtcatcagctctggacctcagcctcacaggcgcttccagggccttgccagcagcccctgcctcagggggagggtgaggatttgtggctcaggtcggctcagagctggcctgagcccagctgactggatttgtcagctagtagttgtgtgacctgttttcccatttgtaaagtgaaaataataatgattatatgatatgataattatagtatgatatgcacattatagcagtgtatatactgcatttgtatataattactgtgtgtgtatatatatatatatgatacctaatagtagtgcctatctgcagacttgcagggattgaccacctcctaggatccctgccttgtgctgggttccaaggacatagagtgagataagaatctattcgtggatcaaagtgctcactgtgtattgaggagatagatgtgctaccaaatggtcaaaacataaggcagaagacacaaaaggccacatgttgtctgatccatgtgtgtgaaacatccggaaaatctatagagacagaaagtagattgccggtttccaggtgctaaagggaggggattgggactaactgctaaataggtgcagagtttcttttgagggggtggaactgctctggaagtagatgatggtttataacatagtgaatatacgaaaaaccactgaaatgtacactttaaaagggtgaattttatgtcatgtgaagtatatctaaatttttaaaatgctacaagtgtgtttttttaaaaaaggcagaataaaaaggaaatgaaccaaaaaaactggatcatgcgacccctgtcagaggcctgacaaaccttagccataagagaagggacttgtgcctaggaattgggaaggcttcgtgaggaagcagcatttcacaggcagagatggagagggagggccttcagcgaggaggggaggggtctgcagcagcagggtcaccgtggtgggacagagctgcaaaaatggcacagggcccaaggtcatgctggggacttggaaggactggctctgtcctacaagtagactgttgacaattcctgctctaagttccaggaagcagggagctagactttgccttcccactgcttccagctcaggccctcgcagggaagaaatagacccaagagagtgctccaccccagcgcagtgtgagaaggctgccccacacctgaatggcacacatgaagttctcagctcagcacccaggagctggaggccagggacccccaaaagaggcccctcttccccagggaaactggatgtgacgcggccccctcatttttcttcccactgccacaggcttcctgcccacactgggcccagcctgggtgaacatgtacggctccacacgtaactacacgctgctggacgagcatcaggacctgaatgagggcctgggggagggtgtgtccttccgggcccggctcctgctgggcctggccgtggagatcctagacacctccaaccctgagctcaccagctccacagaggtgcaggtggagcaggccacgcccatctcggaggtgagaccccaggcactgtgctgtcccccagggcctccagctcagcccccttctccctgagtcacctgggtcccaggctttgcctgttgctgccctgtctacctgaggagtcagacctcaggataaggtttctccccaggaagcagaggcccccactcagccccccaacaggactctgccctcgtccactgcctgcctgtgctctgtctcacaacggccgccaggtctcacgatggtgcctcccctctgcccctcttcccagccacggctgtccctgtggtgtccgcagccagccctgcttccatggatatccaggctggggggccgttggggtgtgggcttcctggccccaaagccgggggggatgcccccaccatccacccccagggcctgtctgtgagacggaaggaggcctggcccccgacctgccacccttactcaagctcaggaatgctttgaactgcctccccacagagctgtgcaggtaaaatggaagaattctttctctttggagccttcctggaggcctcaatgatcgaccggagaaacggagacaagcccatcacctttgaggtcaccataggtgagtgctgggcccacagcaggcttcaggcctaggtgagcgctggccccacgggaggcttcaggcctaggtgagtgctgggcccacgggggcttcaggcctaggtgagtgctgggcccacagcaggcttcaggcctaggctgcaggtggtaagtgtgaggctctgcacctcagccctgtcctcactcttgtagggaacgttgacccctttcccccgagaggcctcaagcccccacaaaacacctttgtgtgtgcatggggtggaccacgccccataaaggggccaaccctcagctccacctacagggtgaggctgtgtttgggacctggggcagagggcagggagaagcccttcccggagctggagaggagagagtgggaactcaggccacagcctgggccagggctgggcctcgcactcaggcgtcatgaggactccctgactctcagcggagtggggacacggggtaatgctctctggctaatgatgtgtcacatctgagccccattccctgactctccctctcccctttcccaaacccaaggcagcaccggattggacggtgggaggggcctggtggggaatgcactctaggccttctgggcccattctgctccaggcaactatgggaacgaagctgatggcctgtcccggccccagcggcctcggccccggaaggagccggggggtgaggaagaagtagacctgattcagaacgcaagtgatgacgaggccggtgatgccggggacctggcctcagtctcctccactccaccaatgcggccccaggtcaccgacaggtgggcccagcctcccatcctcctgtggcctggccctcccacctccctgggcccccaagacctcacctcccgcctctgcccaccccaggaactacttccatctgccctacctggagcgaaagccctgcatctacatcaagagctggtggccggaccagcgccgccgcctctacaatgccaacatcatggaccacattgctgacaagctggtcagggccaggccaggggccagcaggggtggggtcctgggggagacggcgctgtcagagggccttccctggaacacacaaagctggtctgcccagggggctgcaggaacggccccagcaggacctctgttcccatcctcagccccaggtcccaggcacagacaagggcaggagccacctctagtcactgcagcctccagcgaaccctggggcaggagtgttgggttccctgatttttccagaaatcttaaaagcaaggctagggagacaggtgtggtggctcacgcctgtaatcccaacactttgggaggccaaggcaggtggatcacctgaggtcaggagttcgagaccatcctggccaacatagtgaaatgccatctctactaaaaatgcaaaaattagcggggcttggtggcgggcacctgtaatcccagctattcgggaggctgaagcaggagaatcgcttgaacccgtgaggcggagtttgcagtgagccgagatggcgccactgcactccagcctgggcaaccgagcaaaacttcatctcaaaaaataaaataaaataaaacaaaataaaaaagcaaggctagggaagggaaatggggaaaagggagaagcgagcagtgtctgaagctcaggagctgccccctcctcctctgcccacccctctccccccttgagccatgggcactgactgggtgaggagtgcagctgttggcgtgagacctccttctccccagcctgggggagcagggaccagcagataatcccactcttccctgagctgttgctgttccctgttgaagttccctgaagctcagccagctcatattttataaaaatgaattaaaacctccaaaaaaatcaaggctaatatgaggtctgctcccagccccctcccaatgtcctccttgtcatccctgtcttgtgactataaccacaattaaagcccatagcctttgcagtgtgacctgggtctgcagttatctgcaaggcttccccctaaggagctggggtacaagctgacctgtgtttcctgtgggacctgtgtctcacagccctcccagtgctctcagagccagagccactccctcttcccccaggcatctgttcccatcccctgccacaggccccagcattctggagtgacgtcaggatcttggcacatccagtcctagggtttccctctgtctctggccagccctgagccccctagccctgagttctgcccaggccctgtgagctcaccagagccacagactcacagcccagaggtggcttcttccttcaggaactgaagaacccatgaacaccaacatctccaggttctgagaacagaacctgggaaattgatgacttcctcatgatcaccgatactcaggatggccctagcgagagctcccagatcatgaggtccctcactcccctgatcaacggggaggaggcatttggggaggctggggaggcggggctgtggcccagcatcacccacactcctgattcacaggaagaaggcctgaacgacgtacaggagatgatcaaaacggagaagtcctaccctgagcgtcgcctgcggggcgtcctggaggagctgagctgtggctgctggtgagaagggaggggcggcaggtggggggaggatgaggcggaactggacaaaggggaccctgccagggctgggcagatgaggaagaaactacagagcccctgctggtcaggctcgctaaaccccggctccccctaccctcagccgcttcctctccctcgctgacaaggaccagggccactcatcccgcaccagacttgaccgggagcgcctcaagtcctgcatgagggagctggtgaggaccgactggacagcggggactggagggagggcctggctgtgagaaggtgtcacaaccccctttgtcatggcctgagctgtcccccagttgctgggttcactgacaccccctccttcgcaggaaaacatggggcagcaggccaggacgctgcgggcccaggtgaagcggcacacggtgcgggacaagctgaggctgtgccagaacttcctgcagaagctgcgcttcctggcggacgaggtgcggcaaaaggggtcggggctttgcctcatccagggctggctctctggggcccctcaggctcagggggctcagtcaggaggctggacccccttacccgctgcccctggccaccccccaacccccagccccagcacagcgttcccgacatcttcatctggatgatgagcaacaacaagcgtgtcgcctatgcccgtgtgccctccaaggacctgctcttctccatcgtggaggaggagaccggcaaggactgcgccaaggtcaagacgctcttcctcaaggtgctggagggagcaggatggatgggggcctgggtcctttcaggggagcagcagcccccacctggggctggacggcctgagtgacagggtggggccttcaagcagcaggtgctcagagaagagccaagaatgggaaggaggtgggggaaggggtggggaaggaggtgggggaaggggtggggaagggggcatgacggccccctgcccatccccctgcctccaccggaccccagcccagcgggatggctgtgaatgggcagggcagctctgaccagggcctctgccagcccctgccccttccccaccccttgggccctggcagccgtcaggctcctggtgaccccatgcccgcccccagttgccagggaagcggggcttcggctcggcaggctggacagtgcaggccaaggtggagctctacctgtggctgggcctcagcaaacagcgcaaggagttcctgtgcggcctgccctgtggcttccaggaggtcaaggcagcccagggcctgggcctgcatgccttcccacccgtcagcctggtctacaccagtgagtgaggacccctcactcgaagcctcacctgggagggggctggaggggctgcccatcccggaacctcaggctgcccttccccacagagaagcaggcgttccagctccgagcgcacatgtaccaggcccgcagcctctttgccgccgacagcagcggactctcagacccctttgcccgcgtcttcttcatcaatcagagtcagtgcacagaggtgagggcctgggaggagggagtggctctggctttgagagcacaggaagcctgtgagcctgtggggactggagcctgtggggcctgtgagcctgtggggcctggagccacaggtcagccagtgccccggtttctcaggggaagccctgcagataactgcagcagacgcgggtcacactggaaaggctatgggctttagctgtggttatattcacaagacagggatgacaaggaggacattggcagggggcttgggccaaacctcttattagccttgattttaagatttctggaagaatcaagacacctgtcactcctgcccccaggttccgtggaagctgagtgagtaggggtggcttctgtttgtgcatctgcccaccctctgtcacttgtcccctgtctccccatcccatgctgcaggtgctgaatgagaccctgtgtcccacctgggaccagatgctggtgttcgacaacctggagctctatggtgaagctcatgagctgagggacgatccgcccatcattgtcattgaaatctatgaccaggattccatggtatgggtgggctctggtgccagggaccccagcagcaccacacctggcccttgttccctgcactccacctgcactgaggctgtgccctcacctccgccacccacctgcagagctccttggccaggtgctggctgggaagctgggagtgggggctgacatctagctcctcctgcctgcttgcggcagcctgaccccttcccgggccaggacatcctcacctcctgtcacctacagactgagccctgaaggtgtgccagcaagtcctgctgtcactagcctccccaccccagggctccctgacccctgccctcacctaccacaaccagtaacagccttgccgtcctctgtggaggttctggagcagggagtaagggattggggtgacccccgagagttagcgagccaccttctcacataccacctcagctgctgaggtgcccagatagccctggactagaggtaggaggacctcatgtctagtcctgagctgggcatctgccatttactgacggcttggccttgaacaagtctttggtgggccctgagacttggtttcctcatctgtaaaatggggtgatcacacctgtcccttacaacaactcatggggctgtggtaaggaccaaacgagatcacaggtgtggacagcaagcaccaagaggcttctgggttgtctgttgcgtcagggcaaagctgacttcatgggccggaccttcgccaaacccctggtgaagatggcagacgaggcgtactgcccaccccgcttcccacctcagctcgagtactaccagatctaccgtggcaacgccacagctggagacctgctggcggccttcgagctgctgcaggtgggactgcagggaagaggggctgaggcctgggaactggaggctgggagttggggcctagggctgggggctggagcctgaaggctggggcctggggtctcgggcctgaagtctggggcctggggtctggggcctgggggtggggcctgggggctggaggctggggcctggggtctggggcctgggggctggggcctggggctgggggctggggctgagggctggggcctggggcctgaggggttagggcctgggcgttagggcctgggggttggggcctggagctggggcctgggggcttgggcctaggggcctctctcctacccatcctgaccaaagctgggggcgtggtccttagggggtttccctgtctccccagatcatggcaaacaactcatggggaaagagaccctgtccctgggctccccagtgtgtgacctgtgacccccattccccagattggaccagcagggaaggctgacctgccccccatcaatggcccggtggacgtggaccgaggtcccatcatgcctgtgcccatgggcatccggcccgtgctcagcaagtaccgagtggaggtgcgagggctctgtgtggcccttcccttttggatgaggagtctgaggacccaggaggggaagtggcttgtcatccccctcccaccaccatcaccaggagccagcagcagacccaggctcctgccccagcccagggcctgcccccatctgcaccaagtcgcactcccatgtcccaggaccatgcccagccctcctgtctgcacccctgactctgcaccccttctccgggcagccccaccctcatccctggagaacgcctgcccctcctctgctctcctggccctgctcccaccctttgaaatctggggtgaactactgcccatcccactgcccagttccttcttggatggtccagcacccccatggctggctcccttgactaaggggctctcttctctgcacccaccccccaacctctcccaggtgctgttctggggcctacgggacctaaagcgggtgaacctggcccaggtggaccggccacgggtggacatcgagtgtgcagggaagggggtgcagtcgtccctgatccacaattataagaagaaccccaacttcaacaccctcgtcaagtggtttgaagtggtgagtgcaggccctggcggacggaggacgtcctgtgtggctccactcagccagccggcttcctctgccccttcttggaggctcaggctcctgtcgccaacaccccaggacctcccagagaacgagctgctgcacccgcccttgaacatccgtgtggtggactgccgggccttcggtcgctacacactggtgggctcccatgccgtcagctccctgcgacgcttcatctaccggcccccagaccgctcggcccccagctggaacaccacgggtatggccacatccaccctgccaccaagcctggctccacgccccccagggaagggctccaggtctccgcccagtccaagccgcgaccagagtttgctccttggggccgagggggtgggcatagacgaaggtcaccctggtggccaaggaaggctgcccaaggtgacgccagctctacagccagagagggcagaactggagacagcctgggggggcctgagggcagaaagccccttgcgctggttgatggagaagacccaggcctccccgccacctccctcccgccggcctccgcagcttccccttatctcgggctctcttcttccctcctcatgcccatattttctcccttgactggctgtccccctctccctcagaaagttccagaatcagctttagttctccgcaccttcctgccccgccaatctcactgttcctcttgctccttcctctgcctgtctgtccatctatccatctgtccagtctggcttctccgacgctgccgtgtgctgtgcaatgggggctcctcctctcactccacaggggaggttgtggtgactatggagccagaggtacccatcaagaaactggagaccatggtgaagctggacgcggtaaggcgggtggggtcagccccctgctggctgggaacatgcaactccgtgtgacacatcctgtgaaccagactatctgccccgagagaaaaggacactaagagcctcctttggcatgtgactgtcgggggctgaacttgattgtgtgtccaaacagctccctcctaatactatcctggaatgcacacgcgtgcgtgtggtgtgtaaatgtgcatgtgtgtgcgcatgtgtgtggtgtgcatatgtgcatgtgtgtgtgcatgcatgtgatgtatgtgcatttgtgcgttcatgcatatgtgtggtgtgcatatgtgcatcgtgcatgtatgcatgtggtgtatgtgcatatgtgcgtgcatgcgtgcatgtggtgtgtatgtgcatgtgtgtgtgcatgtatgtggggtatgtgcatatgcacgtgcgtgcgtgtggtgtgcatatgtgcatgcatgtgtggtgtatgtgcatatgcacgtgcatgcatgcatgtggtatgagcatgtgcatgtatgtgtgcacgcatatggtgtgcatacgtgcatgtgtgcatgtggtgtgtgcatatgtgcgtgcatgtggtgtgtaaatgcatatgtgcatgtgtgcagtgtgcatgcatgcgggtggtaggtaaatgtgcatgagtgtggtatatatgcatatatgtgtgcatgtgtgcttgtggtgtgcatgtgtgcatgaggtatgtaaatgtgcatgtgtgcatgtggtgtatgtgcatatatgtgtgcatgcatgcttgcggtgtgcgtatgtgcacatgcgtgcatacatgtgggtgtgtgcatgtgcactggcatgtggtatgtgtgtatgagagacagagtgagccatcacagtttattataatcacctgctataatttttactccaacaaatgacaccataggtaatgattccttatgagatcatcagtgtcctttccaaagagtccctggttttccatcccggccattcacaaatgacacttccccagcctgggtcggaggaggatttccaggtggaagctccttattcctcctggctttgggcctaggactgttcatctgccagagagagaactgccacctgggggttgggtgtggaagtggcgtacaagctgtagaccctacagggaagggcagaacgtgggccagcctggaacacagcccactgttcctttggccacccaaagaaacatcctcactcagaccctttgcagactcaccagtcagagtgctcttattaatgcaaagttggccttgcgggcacaggggctgccagcacacagtaatttctgtcttggctcctccacacaccctgtgctaggccactgcctgccactccaggccccagtggctgattctgtccctgtctccttggttcctctgcagacttctgaagctgttgtcaaggtggatgtggtgagtgtgggggccatgcaggggctctggggtgagagggtcctttattggcaatgatgtcaggccaaagggtccagcatcagggacagagccagccccagcccccgcatgcttgggccagcacacctcccctaagatgcagtggaaaagagctgggtgagtgcaggactcggtgccagtcctgcttgggcgagtggatcacactggcaggtcacaacactctgtggcctgtggcaccttctccataaaataaggccctgccccttggacatgggtggccccacagggcctcatggagcccaaggcttcctgctgacagatggcggaatgggtggaggctctcgggattgtccaggcaggaggagtccatgtaggactctggacctggccaacctgcaggctgaggaggagaaggagaagaagaagaagaagaagggcactgcggaggagccagaggaggaggagccagacgagagcatgctggactggtggtccaagtactttgcctccattgacaccatgaaggaggtgagacctcgggtagggtgaggggaggtgacccctccacactcagaccctcctgtccagcttctttcccacggcccccaagagctggatcccacctccattcatgtgagtttgggatggctttgtctcacatccttgaaatcctagctcagaactcaccttccaagatgatggtcccatctaccttccctgcttggttttcttttgtcctcattgactcattccacaaatgcctcttgggtatatgcgatgagccaggctccatactaggtgctatgggagccaaaagatgccacacctgccctgatgggcctccggtttactgggcaaaatggacatgtaaacagagacttagagaggactatgtgataacaaaggcaaatcatggcttgggggaatcagggaaggcgtctcagaggaggtgacctttgtggaaaaggagaaacatgttctcagaggccataagggaacaactgcttatcagtagtccttacgactcttcttcatactgttttattttacacatcttggtcatcggcacgtgaatgattcttcccctattacacatatgtgggttccatctgtttggccagaaacagttccagaaagcgcatttctctgctttcttgtttgtgtcctctccacgctgcctacctagctcagggtgctctgactggccacctgaccaggagggacacatgcctgcagttgtgtttcctcagtggggccagagctgatccagccacatcctctcccaggccctttctgtgacccaagctaggtgtgatatttattagagcacacattaagctgctgtagcaagttagagtgaagtgaacaagacagcggtttatttctcacataacatctcagagagtgggggttaggctggtatggtggctcagtggtgtcaaggactaagatcctgacctcttgtttgtcacatctgtagggttggaggtgactcaacatcgtgttctaattcaagtgcacaggaagggttaaagaggagatgaggcatatgcttttctttttcagggcccaatccagaagctgcacatatgacttccactcacattgaccagaatctagtcccttagctacacttatctgcaaaggaggctgggaaatgtaatctttagcaaggtggctgtgtgctcagcaaaacttgtaaaaataggagaacagatcattgaggacaactggtagtctcgtctcccaccatcaagttggccaggctggagctccaagaggctgcctgttgccgtctctactcctgcaattttcacagactgccaccaggtggcggtggcgacttagttgaaacctggtttctagtttgtagtaagatttattctcgtttccagtaagatggggtgtgctgagtgaaagaaaatatagtacattttcttactgttatacttttctacattaaaacaattaatttattaatatcactaaaagcaacattaaaatgcactgtacttttttaagtagaaaatgtaaatatttattgcaaggtgttatttcttttttttttaaattatactttaagttctagggtacatgtgcacaatgtgcaggtttgttacatatgtatgcatgtgccatgttggtgtgctacacccattaactcgtcatttacagtgggtattgctcctaatgctatccctcccctctcccccaacaccaccacaggccccggtgtgtgatgttcccctcccttgtgtccaagtgttctcattgttcagttccctcccatgagtgagaacatgcagtgtttggttttctgtccttgtgacagtttcttcagaatgatggtttccggcttcatccatgtccctgcaaaggacatgaactcatccttttttatggctgcatagtattccatggtgtatatgtgccacagatgcataaacccctaagtaccactagtcacactgtacacattataaactttttttgacccacttaagcagagaacatggtggatttgaaatgcagtagggaagattttctacttctagtgcattaagactggtctgggcccacagtttggggtcaacagactcctccccaggaaacccaccttctgtccttttcatctcatcttttggcagcaacttcgacaacaagagccctctggaattgacttggaggagaaggaggaagtggacaataccgagggtgagccctggaacctggaactctgcctcctcctccccacccctgggtggtcagctctcctgcccacctcatcacctgcttctcttttccctcctgccagccctcccagccttagtagccagggaagcagcatcagtaatccgtgggcagtactgggcaggctaaggcccttgtccagggaggcttttactctgaccagttcagcgcccacagtgatgggcagacatttagagccacggaacatcagagctggaagggacctcagagctcattccatccagcattttccagactcttttccatgaagaaaattgatggatgttctagaaggaacaaattagttttgatcaaattagtttaggaaaagctgattgaaacagcttgttttggtgcaggacttttcataccctttactgtgcaaatgttattatacatctctaaaaggaagacacagtataaaatatttccccagcttattggatcacagtactctttcttctaaagcatgccagcagcatctgcaccaggtgctccactgaatgaggtttgggaaatgctaatacagagtgttattattatggacaagaagagggaagctagtgaggaaagtgagtgggcaaggaactgcgcagcaacaggcctccacccccaaacccatgctccttcctgcccctctcttccaaagggcatgaagacggtcttcagacaccttcccgggcataaactcactggggccccagcacctccatgaggcgggcatgctagggagtattatctgcatttgacagcacatggacatccgagagttaagttagtaaagcaaattagcgacagagctgggtctcgaatccaggccttcctgctctgctcatttctgctccacctccttttctgcttctggccaggcctgaaggggtcaatgaagggcaaggagaaggcaagggctgccaaagaggagaagaagaagaaaactcagagctctggctctggccaggggtccgaggcccccgagaagaagaaacccaagattgatgagcttaaggtgagagcctaggagcagacccttctagggtgtgcgggggcgggaagagggggcgcagtgatcctgcaggtggggcaggacaaaagccagagaccaggcagccgccccctaacagcctggtctggctcaggtataccccaaagagctggagtccgagtttgataactttgaggactggctgcacactttcaacttgcttcggggcaagaccggggatgatgaggatggctccaccgaggaggagcgcattgtgggacgcttcaaggtcaggccaggagcacgggcccagcctgagcacccgccagcccttgccccaccacaggttctcccactcacctcccaccgctgccccggccactccctccagaagccctggactctcccatgactcagcagttaaagggtgaaggccctgccacatcagggtccagccctcccggtgctgttagctattttgaatgccacccttgccaggcaaacctacaccctgacccacatttgtcttgcccagggctccctctgcgtgtacaaagtgccactcccagaggacgtgtcccgggaagccggctacgactccacctacggcatgttccagggcatcccgagcaatgagcccatcaatgtgctggtccgagtctatgtggtccgggtgagactcccgttgctttccctccttgcaagtctcctcatcctcccatctgggagagaccaaagaagctgcatactggccaggtgcaatggcttacgcctgtaatcccagcactttgggaggccaaggcaggaggatcacctgaggtcaggagttcgagaccagcctggccaacatggttaaaccccatctctactaaaaatacaaaaattagccaggcacagtgccacacacctgtaatcccagctactgaggaggctgaggcaggaaaatcgcttgaacctgggaggtggagcttgcagtgagctgagatcacatcattgcactccagcctgggagacagagtgagactctgtctcaaagaaaaaaaaaaaaagaagaagaagctgcatactgacagccccagactgggaggcaccagggagatcgtttggtctagtctttatcttttctagaggaagaagtcaacgcccagagaggggtagccacttgcctagggtcacacagcaagcctcctgaggggtccagtgctcctgcccctgcccttcactgtcataggaccctcaggcagcctggcaggggcactgaagatgagcagggcatgggagcctgctcaggcagcccttctccccattccaggccacggacctgcaccctgccgacatcaacggcaaagctgacccctacatcgccatccggctaggcaagactgacatccgcgacaaggagaactacatctccaagcagctcaaccctgtctttgggaagtaaggcttcttggtgccctcccctgccacaccccgacttctccaacccagaacacctcccaccctagccaatccttaagcccttctcctaactccaccccaccaggtcctttgacatcgaggcctccttccccatggaatccatgctgacggtggctgtgtatgactgggacctggtgggcactgatgacctcattggggaaaccaagatcgacctggagaaccgcttctacagcaagcaccgcgccacctgcggcatcgctcagacctactccacgtatgtggggcatggggcagagagcgggggcagtgtgcctgctttgcctccactctaaaatgagattcagatcctggtgatttgagaggttagacattgtggtttctgtcccaggccaggcctctgcccctacagtccctgggcacagtcttcaggggacaggactgcagatcccaaaacaaggagagggacagtggattccaggacagaggaggcaggacgaggagagacaagtgggctagggaaggtgggggctagcagaggaggacagaaagagtcccctggggatctgggccagctctgccacttataggctgtgtgaccctggccaagtcccttcacctctctggttttcagtttcctcatgggagtctctgaggttccagaggagtgggcacagtgaggggatgcggtggggctaggctggggacactgatacgtggtccaaggcccagggcaggagggttcagcctccagcggccctagtgtctcaggtgagcctgggacccagggcaggaggaatcaggctcacttgctgatgagggcaacagccaactttagagaactggccacgaccagctgtcatccaggatggcttagtcccacccagcccctccaagcctgtgtgtcccctcccacagacatggctacaatatctggcgggaccccatgaagcccagccagatcctgacccgcctctgcaaagacggcaaagtggacggcccccactttgggccccctgggagagtgaaggtggccaaccgcgtcttcactgggccctctgagattgaggacgagaacggtaatggggcactggatgcagccgcctgccccctctccagggggtttcagaggccaggaggggcccacacttccctggggaacctcacagcctagcctggggtgtcctcagcctaaacctggtcttagtgaccctctgctcatcaccccagagccccgttcctgtctgcccagcctctgtgcttccacccctcctacagggcagccccacctgctttctctctgtccaaatcccagtgaggtagagaggttatctgcatccctttctgcagataaacaaaccaagatcctacttctagtgactcgcccaaggtcatgtggctctttagaggcagagcgagggcatcggcccaggtccgtctggctctaatccttaaactctccttacttctctgtccatgaggcacttcccagagaagcagagaattgggaggtgtctgtgctggtatctgatcactttcaggtgctgggacaggaagtggattttccctccctgacccttctctcagcccagcagggctctccagtcaacttccccaagcagaggaccaagggcacagacctctcttggccctgtggggcagctgagaccctgggcaagccacttctccttctgtgcctcagtttccccaacagtgaaaatgaggtggggtagataggtgatggtgtaggggcttctttgtgctcctgagtccctagtcccagcaaaggcctcctggttctgctgagccatgtgtgcagctgagccgccggcacccacaggtcagaggaagcccacagacgagcatgtggcgctgttggccctgaggcactgggaggacaccccccgcgcaggctgccgcctggtgccagagcacgtggagacgaggccgctgctcaaccccgataagccgggcatcgagcaggtgacacttgcatggccaagactggggttcttgggtattggggaccagggatccccaacctgaatcagtaaaggtagaagccaggcctcacgctgtccgctgcattccagaaagcctggcaggcaccttcccaccaaggcccctcagggtaacttgaatggcaagggtattcgctttgagtgagaattacatcagctcaggcagagacctgggttgtctccctcagaagctgtgattggctattggtgacatcataggaattcctggcatccaaagatggaaactgatgaactgggtccttgacagaacaaaggttaggagggagaggagagctgatcttcctgggcagagggagaaggccctgggagatctgccacaaccctcttcctcagggccgcctggagctgtgggtggacatgttccccatggacatgccagcccctgggacgcctctggacatctcacctcggaagcccaagaagtgagcggcctggggcccagcgctactcccttccggcccaccccacccacttcccaccacggcccaacccttcctgcgagggactcaggtccagatggccttggccagttggcatccctggggcctgggtgtggccactgggccttataggggagaaactgaccaaccaatcgatagagtttagggcctgccctggagagtccccacgtgctaaggcaggacaacgccttccaccctgcatcagtgagcgagacaagccccacacagcacactctgatgcattgtatctacacggtcgacgcgcccatacacatgcatctcatgcacacacacacacagcatagcactcccacggacacccacacacatgcccacactgacacactccttcacaacacacagaacccctgggagccggccctgtgtcatcctcacatccaggctagtgtgatgttccgccaagttttctttggagtgcctgccagtgatgaatccaggagtgagtgcctggaagaggcaggaggtggtagagtgaaaagaacccgggtttcccatccataaagcagcaggttcgagtccagctgtcagacagtgactggattcagggccagcttcagggatggaggaagccacacagggtcccactcttgtttccatgctcctatgttgccatcttgaaattctttatgacaagtgaccctgcatttccatttggcgctggccccagcaaatcatgcagccaattctgccaggaatgtcctggaaacctgaggccgtgagtcagctgttccagggcctgtcattagggggcacccaactcactgggccactctgggctcacagccctgtctgcaatcccaggagagccatgctcagatcaatttttagtgaatgactcagcctcactcttaatgattgaaatgaactacatcattcataattacaattaaaccttgaggggaaaattctctttggggacagggacatacagcttccatgggcttccattgctggctactgggcttaaatgcagacttctcttggaactagcatctgagacagagggtggcttcctcccctcaccccacccccaccgcccacagccaggtgcctggtgggccttctcactcatgcctctgctcccccaaccccaaaccactcctccagccccagcctggcccaggccccgtgctgaccccaagtccccagggcttctctccgcctgccccatcccagccctggcaccctggcataacccccacctggggctgctaaccagccttctctccctgggcccaggtacgagctgcgggtcatcatctggaacacagatgaggtggtcttggaggacgacgacttcttcacaggggagaagtccagtgacatcttcgtgagggggtgggtgagcagtccctgcatgggagggactgagctgagtggggcttgcttcctgggagggcaggagaggaggcagagggaaggtggctgtgggtgggagaggccccaccggcctggctgcgggtctggagatgtggcgcccacaggtggctgaagggccagcaggaggacaagcaggacacagacgtccactaccactccctcactggggagggcaacttcaactggcgctacctgttccccttcgactacctggcggcggaggagaagatcgtcatctccaagaaggagtccatgttctcctgggacgagaccgagtacaagatccccgcacggctcaccctgcagatctgggatgcggaccacttctccgctgacgacttcctgggtgcagagcagggcagggatgggggttcaggatccagaactgagaagaggcaggggccgggttggcagggacagggagagccctgccttggggagacaaggggtcattgcttccagtccgtcagagccaggggtgtccgacggggttccgcccccaaggacccacctaaccgtccctaggcagatgttctcagtgtcataaccaggctgacaacaagctttggacacaccaaggagggggcagtcagtgatgatgggggaggggagaggctccgtaagggagtcgggaaacctccctgggcctcaggttgcttctctgtaaagcagggattctccctaaaactcgaatctgcatctacaaaagcttgtgagattagcaggactttgacagaatagatgcatggcagggagtggcaggggggaccccaggagagaccctctggggtgaaagaaggacctgagtaaagcatgggggctggggctgcctagcaagcccacgaggatgcctgcattgaggccagttgctgggagtgaggcaggaggatgagatgtgggctcggggaggtctgcactcagcaaacaaggggccgaggagcccagacccccacccccaccctgccccaccccagccctgttcactcagagctgacactgaggtcgccacaggggccatcgagctggacctgaaccggttcccgcggggcgcaaagacagccaagcagtgcaccatggagatggccaccggggaggtggacgtgcccctcgtgtccatcttcaagcaaaagcgcgtcaaaggctggtggcccctcctggcccgcaatgagaacgatgagtttgagctcacggtgcgcaccccttccggctcgggcagtaggcagggctgggactggctggggtgccaagggcccagcacacagcctggacgctgggacctgtctgtcctctgcagggcaaggtggaggctgagctgcatttactgacagcagaggaggcagagaagaacccagtgggcctggcccgcaatgaacctgaccccctagagaaacccaagtgagtgccctgccggcccagcccctccccacgctggctcttggaggcgctggaacaggaaggagacgctccccagacaccccatctcttcctgggccacagcctcattacaggggagcctcctccctgccctctgctgaccctgaatcccacaacgtccctttgaaccagaggatgggctaggaatactggagagcaggaccttccctgggaaaggccccatctagcggagagaaactatgctcttcccttcctagcttttgcagaagagccagctccagtggtggcctctggggccttggccagccttgatggccagaggggtgcctagaactgcacacacagcccaggacagcttccctcttggtctggatccctcgccacacccaatcccttctcctccctgtccctcctctgcgctctctacccttcatgctccagccggcccgacacgagcttcatctggttcctgaaccctctcaagtcggctcgctacttcttgtggcacacgtatcgctggctgctcctcaaactgttgctgctcctgctgctgctcctcctcctcgccctgttcctctactctgtgcctggctacctggtcaagaaaatcctcggggcctgagcccagtggcctcctgggtctgatatttcttacttcttcctctggaccaagggctaggcaggcacgtgcacacacacacacacacacatacacgcacacacacacatatacacgcacacatccacaaacacaaatatgcatacatgtgcacacaaacacacacaagcatgtatgcacacatgtgccacgcacaagtgcatacacatgcactcaagcacacacaggcacacacttaagcccacacaaacatgcacagcaactttcaagctttcatgacagaatagactctcagaactagaaatgactattttacacttttccacattaagccaaagaggtgaagtagcttgctcaaggttacccagcaaattagggtagagccgggactcaagccaaggtttccaaatttccaattctgtgttctttgcacaccacctctgctcccagccatgtttctcccagactctaacccaatttttttttttttttttttttttgagacagagtctcgctctgtcgcccaggctagagtgcagtggcacaatctcggctcactgccagctccgcctcccgggttcacgccattctcctgcctcagcctcccgagtagctgggactacaggcacccgccactacgcccggataattttttgtatttttagtagagacggggtttcaccgtgttagccaggatggtctcgatctcctgacctcgtgatccgcccatctcggcctcccaaagtgctgggattataggcgtgagccaccgcacccagccgactctaactcaatttcattggcaaaaagaagctgagctatggacagggaaaagggaagggtgtggccagggttagccaacaggtctggaaatggctctcacctgtgtgtgacctcccagtccagggctgctgttttctgcccttcaggataatagttccattcaactcaaacatttcatagccaccatggcctgaacacccaactgcaggtgctcagagctccccaggcactggctcactgtgccattgcgccaaacccaggaggtaggtactgcttgtaaccccattttatacatgaagaaaccgaggttgatagaggtgcctcacttgcctgtgaaaaccattcaaaaccaggtgtcctgcacccaagccccggctctgtgtccccaccaatactgagctcagctctggggctgcacgccatgtcctctgggaggcagtagtttgaaaatgcatatgcagtactttcacttgtatcttgacattttacaaaacctattgtttttataacacaaatgacagatagtgaggctggccaggtgcttctcggctgggaggctctacagaaggtggagtgggtcttcatcctgagagtgggcaggttggtgagggcagcttgcgccccacaggggctgctcagaccctcagcagggcccagtgggaacagccatttatgtccagaagggaagaggttgtgaagcaccggtcttaccaaggacatggggcagcacatagaacgagctaaccgcaggagcttcctaacgatgagaactgcctgcagggccaaggctgccccatgctgcaagtagctcccatctaggccttaggaggagattcgggccccaaaggtgctgcagggaggatagagttttgtaagcagcaagtcgggtacttagaaatgggttcaaaccctggctccagcattcactgcttttggggctggggccatggcagggcttttgggggtccagaaggacagaggatggggtgcactgggagacagctcctgcccactggctgaccagctcctctcttccacttcccagccggcccgacacggccttcgtctggttcctcaaccctctcaagtccatcaagtacctcatctgcacccggtacaagtggctcatcatcaagatcgtgctggcgctgttggggctgctcatgttggggctcttcctctacagcctccctggctacatggtcaaaaagctccttggggcatgaaggccgccagctgctccccagccctgccgcatttcctttcagtggcttggactctttcccatctcccctggggaggctgaggagcccagcgttcactcttcatgccttgggccgagcctgcctcctgcttgcggggccgcctgtcctcactgccccaggctgcggcttgccgagtcccgcccctctgacccctgcctgtgggctgggcagccttggatggggtggggacctggaatgggtctctcttgccccacccggctgaggcgccacccttcttcaggcccaggctccagaggaagactcctgaaaccctccccaggtcttccaagtacaggattgaagctttagtgaaattaaccaaggaccatgggtcagtgcccagggctttaaaaagaatgaacgagcaaaaggtatccccaccgtgacccctgcagatagcaccggtctttgatccgcagcaggggccagaccctgcccacaagtcccggcacggctgcttctgccactgctgggctccacttggctcctctcacttcccagagtgtcgcctgtcctgcctgtgggtttccatggcttcccagagctccctctgccccagccagcgcctccaggcccagctgaggagctgtgagaagcagcagaggggactccccatcccgggcacaccctgtcctcccacccctgccccccttgcccttccagccctttcagctgcagctgggagctggcccgtcaagtgctgcccctgcctgtgtctgggtttctgttggctgtttttcttttcctgagtggtgatttttctctaaataaaagaagtcaagcactga

SEQ ID NO: 20 - protein, 1998 aa, Rattus norvegicus
MALIVHLKTVSELRGRADRIAKVTFRGQSFYSRVLENCEDVADFDETFRWPVASSIDRNEVLEIQIFNYSKVFSNKLIGTFRMVLQKVVEENRVEVSDTLIDDNNAIIKTSLSMEVRYQAADGTVGPWDDGDFLGDESLQEEEKDSQETDGLLPGSRPSTRTPGEKSFRRAGRSVFSAMKLGKTRSHKEEPQRQDEPAVLEMEDLDHLAIRLGDGLDPDSVSLASVTALTSNVSNKRSKPDIKMEPSAGRPMDYQVSITVIEARQLVGLNMDPVVCVEVGDDKKYTSMKESTNCPYYNEYFVFDFHVSPDVMFDKIIKISVIHSKNLLRSGTLVGSFKMDVGTVYSQPEHQFHHKWAILSDPDDISAGLKGYVKCDVAVVGKGDNIKTPHKANETDEDDIEGNLLLPEGVPPERQWARFYVKIYRAEGLPRMNTSLMANVKKAFIGENKDLVDPYVQVFFAGQKGKTSVQKSSYEPLWNEQVVFTDLFPPLCKRMKVQIRDSDKVNDVAIGTHFIDLRKISNDGDKGFLPTLGPAWVNMYGSTRNYTLLDEHQDLNEGLGEGVSFRARLMLGLAVEILDTSNPELTSSTEVQVEQATPVSESCTGRMEEFFLFGAFLEASMIDRKNGDKPVTFEVTIGNYGNEVDGTSRPQRPRPRKEPGDEEEVDLIQNSSDDEGDEAGDLASVSSTPPMRPQITDRNYFHLPYLERKPCIYIKSWWPDQRRRLYNANIMDHIADKLEEGLNDVQEMIKTEKSYPERRLRGVLEELSCGCHRFLSLSDKDQGHSSRTRLDRERLKSCMRELESMGQQAKSLRAQVKRHTVRDKLRLCQNFLQKLRFLADEPQHSIPDVFIWMMSNNKRIAYARVPSKDLLFSIVEEELGKDCAKVKTLFLKLPGKRGFGSAGWTVQAKLELYLWLGLSKQRKDFLCGLPCGFEEVKAAQGLGLHSFPPISLVYTKKQTFQLRAHMYQARSLFAADSTGLSDPFARVFFINQSQCTEVLNETLCPTWDQMLVFDNLELYGEAHELRDDPPIIVIEIYDQDSMGKADFMGRTFAKPLVKMADEAYCPPRFPPQLEYYQIYRGNATAGDLLAAFELLQIGPSGKADLPPINGPVDMDRGPIMPVPVGIRPVLSKYRVEVLFWGLRDLKRVNLAQVDRPRVDIECAGKGVQSSLIHNYKKNPNFNTLVKWFEVDLPENELLHPPLNIRVVDCRAFGRYTLVGSHAVSSLRRFIYRPPDRSAANWNTTVRLLRGYHMLCNGGPSSCPTGEVVVSMEPEVPVKKLETLVKLDATSDAVVKVDVAEDEKERKKKKKKGPSEEAEEEEPDESMLDWWSKYFASIDTMKEQLRQHETSGIDLEEKEEMDSTEGLKGPVKNKEKSRAAKEEKKKKNQNPGPGQGSEAPEKKKAKIDELKVYPKELESEFDNFEDWLHTFNLLRGKTGDDEDGSTEEERIVGRFKGSLCVYKVPLPEDVSREAGYDPTYGMFQGIPSNDPINVLVRIYVVRATDLHPADINGKADPYIAIKLGKTDIRDKENYISKQLNPVFGKSFDIEASFPMESMLTVAVYDWDLVGTDDLIGETKIDLENRFYSKHRATCGIAQTYSIHGYNIWRDPMKPSQILTRLCKEGKVDGPHFGPHGRVKVANRVFTGPSEIEDENGQRKPTDEHVALSALRHWEDIPRVGCRLVPEHVETRPLLNPDKPGIEQGRLELWVDMFPMDMPAPGTPLDISPRKPKKYELRVIVWNTDEVVLEDDDFFTGEKSSDIFVRGWLKGQQEDKQDTDVHYHSLTGEGNFNWRYLFPFDYLAAEEKIVMSKKESMFSWDETEYKIPARLTLQIWDADHFSADDFLGAIELDLNRFPRGAKTAKQCTMEMATGEVDVPLVSIFKQKRVKGWWPLLARNENDEFELTGKVEAELHLLTAEEAEKNPVGLARNEPDPLEKPNRPDTSFIWFLNPLKSARYFLWHTYRWLLLKLLLLLLLLLLLALFLYSLPGYLAKKILGA

SEQ ID NO: 21 - protein, 1992 aa, Danio rerio
MALVVHLKTVTELRGKGDRIAKVTFRGLSFFSRVLENCEDEARFEQAFRWPIGSQVDGDEMLEIQVFNYSKVFTNRLIGTFRMVLQKVVEEGHLEVSDTLIDDNNTAIQTTISIEIKYQTMDGSVKVWSDGEFLDIPDDLDGTFQFETDSLLSGRSQSSGTSPGRSIHGIPTFRKAGKGVFSAMKLGKTRTSKDDHKKGDDAAILDAEDLDRKAMRLGGILDPDTISLASVTAVTTNVSNKRSKPDIKMEPSSGRPVDYQISVTVIEARQLVGLNMDPVVCVEIGEEKKYTSMKESTNCPYYNEYFVFDFHVPPDVMFDKIIKISVIHSKNLLRSGTLVGTFKLDVGTVYTQPEHQFHHKWAMLSDPDDITTGCKGYVKCDIAVVGKGDNIKTPHKASEADEDDIEGNLLLPEGVPSERQWARFYVKIYRAEGLPKMNTSIMANVKKAFIGENRDLVDPYVLVQFAGQKGKTSVQKSSYEPIWNEQVIFTEMFPPLCRRLKVQIRDSDKVNDVAIGTHFIDLRKVSNDGDKGFLPTMGPAWVNMYGSTRNYTLMDEHQDLNEGLGEGVSFRARLLISIAVEILDTTSAEIMSSTEVHMEPVSNISESATGKMEEFFLFGSFLEATMIDRKIGDKPISFEVTIGNYGNQIDGVSKPALAKKKKEGGGESEEEESELIHNSSEEEAEDDGDLTSVPSTPPMKPVITDRNYFHLPYFEKKPCIYIKSWWQDQRRRLYNSNIMDKIADKLEEGLNDVQEIIKTEKAYPERRLRGVLEELSTSCSRFVTLANKDQNLSGRTKLDRERLKSCMREMESMGQQAKTIRTQVKRNTVRDKLKLVLNFLQRLRFLADEPQHSIPDVFIWMISNNKRIAYARIPSKDILYSIVDEEMGKDCGKVKAVFLRLPGKKGFGPAGWTVQAKLEMYLWLGLNKQRKDFLIGLPSGFEENKAVKGIGIQAVPPISLVYNMKQVFQLRAHMYQARSLFAADTSGLSDPFARVFFSTHSQVTEVLSETLCPTWDQLLVFDNVELYGEAGELRDDPPIIVIELYDQDTVGKAEFIGRTFAKPLTKMVDEHYGPPRFPPQLEYYQIYRGNCAAGDLLAAFELLQIGPAGRAALPPIDGPTDSDRGPILPVPLGIRPVLSRYRIEVLFWGLRDLKRVNLAQVDRPRVDIECAGKGVQSALIQNYKKNPNFSTLVKWFEVDLPENELLHPPLNIRVVDCRAFGRYILVGSHAVTTLRKFIYSPPDKTANNWAHTGDIVVNMSPEPNIKKMDTVVKIEATTDAVVKVDLNEDEKEKEKKKKKKKKGEEVEEEEPDESMLDWWSKYFASIETMMENLRAQEAAQAEAEEREDLEIAAESAEIKADDFPMKGTKPKEKSKDKKSTKDKKKNNDGTEKRPPKPKVDELMVYNKELESEFGSFEDWLHTFNLYRGKAGDDDDHNVVDEDRIVGRFKGSLCMYKLPLSEEITREAGFDPNMGMFQSIPHNDPINVLVRIYIIRATDLHPADINGKADPYIVIKLGKSDIRDKENYISKQLNPVFGKSFDIEATFPMESMLTVAVYDWDLVGTDDLIGETKIDLENRYYSKHRATCGIASNYSVHGYNVWRDPQKPAQILAKLCKEGKLDGPHYGPGGRVKVANRIFLGPTEIEDESGLKKQTEEHLALTVLRHWEEIPRVGCKLIPEHVETRPLLNPDKPGIEQGRIEMWVDMFPMDVPAPGPAIDISPRKPKRYELRVIIWNTDEVILEDDDYFTGEKSSDIFVRGWLKGQQEDKQDTDVHYHSLTGEGNFNWRFVFPFDYLMAEEKIVISKKESMFSWDETEYKIPARLTLQVWDADHFSADDFLGAIELDLNKFPRGAKTAKQCSLDMVLKEHELPTISIFKQKRVKGWWPFVAQNENDEFELTGKVEAELHLLTAEEAEKSPVGLGRNDPEPLEKPNRPDTSLMWFMNPLRSIRYFIWHNYRWLILKALALLLLLLLVGLFLYSIPGYLVKKLLGA

SEQ ID NO: 22 - protein, 1998 aa, Bos taurus
MALLVHLKTVSELRGKGDRIAKVTFRGQSFYSRVLESCEDVADFDETFRWPVASSIDSNEMLEIQIFNYSKVFSNKLIGTFRMVLQKVVEENHVEVTDTLMDDNNAIIKTSLCVEVRYQATDGTVGSWDDGDFLGEESLHEEEKDSQETDGLLPGSRPSSRPSGEKSFRRAGRSVFSAMKLGKNRPHKEEPQRQDEPAVLEMEDLDRLAIRLGDGLDPDSVSLASVTALTTNVSNKRSKPDIKMEPSAGRPMDYQVSVTVIEARQLVGLNMDPVVCVEVGDEKKYTSMKESTNCPYYNEYFVFDFHVSPDVMFDKIIKISVIHSKNLLRSGTLVGSFKMDVGTVYSQPEHQFHHKWAVLSDPDDISAGLKGYVKCDVAVVGKGDNIKTPHKANETDEDDIEGNLLLPEGVPPERQWARFYVKIYRAEGLPRMNTSLMANVKKAFTGENKDLVDPYVQVFFAGQKGKTSVQKSSYEPLWNEQVVFTDLFPPLCKRMKVQIRDSDKVNDVAIGTHFIDLRKISNDGDKGFLPTLGPAWVNMYGSTRNYTLLDEHQDLNEGLGEGVSFRARLMLGLAVEILDTSNPEITSSTEVQVEQATPISESCTGKIEEFFLFGAFLEASMIDRKNGDKPITFEVTVGNYGNEVDGLSRPHRPRPRKEPGDEEEVDLIQNLSDEETDEGGGLASVSSTPPMRPQITDRNYFHLPYLEHKPCIYIKSWWPDQRRRLYNANIMDHIADKLEEGLNDVQEMIKTEKSYPERRLRGVLEELSSGCYRFLSLADKDQGHSSRTRLDRERLKSCMRELESMGQQAKTLRAQVKRHTVRDKLRLCQNFLQKLRFLADEPQHSIPDVFIWMMSNNKRIAYTRVPSKDLLFSIVEEELGKDCAKVKTLFLKLPGKRGFGSAGWTVQAKLELYLWLGLSKQRKDFLCGLPCGFEEVKAAQGLGLLSFPPISLVYTKKQAFQLRAHMYQARSLFAADSTGLSDPFARVFFINQSQCTEVLNETLCPTWDQMLVFDNLELYGEAHELRDDPPIIVIEIYDQDTMGKADFMGRTFAKPLVKMADEAYCPPRFPPQLEYYQIYRGNATAGDLLAAFELLQIGPAGKADLPPINGPVDMDRGPIMPVPVGIRPVLSKYRVEVLFWGLRDLKRVNLAQVDRPRVDIECAGKGVQSSLIHNYKKNPNFSTLVKWFEVDLPENELLHPPLNIRVVDCRAFGRYTLVGSHAVSSLRRFIYRPPDRSAPNWNTSGRLLQGRRGLYSGGPSSRLTGEVVVSMEPEVPIKKLETMVKLDATSDAVIKVDVAEEEKERKKKKKKGSSDEPEEEEPDESMLDWWSKYFASIDTMKEQIRQQEISGIDLEEKEEMDNTEGLKGPMKGKEKARAAKEEKKKRTQSLGPGQGSEAPEKRKPKIDELKVYPKELESEFDNFEDWLHTFNLLRGKTGDDEDGGTEEERIVGRFKGSLCVYKVPLPEDVSREAGYDPTYGMFQGIPSNDPINVLVRVYVVRATDLHPADINGKADPYIAIRLGKTDIRDKENYISKQLNPVFGKSFDIEACFPMESMLTVAVYDWDLVGTDDLIGETKIDLENRFYSKHRATCGIAQTYSVHGYNIWRDPMKPSQILTRLCKEGKVDGPHFGPPGRVKVSNRIFTGPSEIEDENGQRKPTEEHVALLALRHWEDIPRVGCRLVPEHVETRPLLNPDKPGIEQGRLELWVDMFPMDMPSPGTPLDISPRKPKKYELRVIVWNTDEVVLEDDDFFTGEKSSDIFVRGWLKGQQEDKQDTDVHYHSLTGEGNFNWRYLFPFDYLAAEEKIVISKKESMFSWDETEYKIPARLTLQIWDADHFSADDFLGAIELDLNRFPRGAKTAKQCTMEMATGEVDVPLVSIFKQKRVKGWWPLLARNENDEFELTGKVEAELHLLTAEEAEKNPVGLARNEPDPLEKPNRPDTAFVWFLNPLKSIKYLICTRYKWLIIKIVLALLGLLMLALFLYSLPGYMVKKLLGA

SEQ ID NO: 23 - protein, 1996 aa, Papio anubis
MALLIHLKTVSELRGRGDRIAKVTFRGQSFYSRVLENCEDVADFDETFRWPVASSIDRNEMLEIQVFNYSKVFSNKLIGTFRMVLQKVVEESHVEVTDTLIDDNNAIIKTSLCVEVRYQATDGTVGSWDDGDFLGDECLQEEEKDSQETDGLLPGSRPSSRPPGEKSFRRAGRSVFSAMKLGKNRSHKEETQRPDEPAVLEMEDLDHLAIRLGDGLDPDSVSLASVTALTTNVSNKRSKPDIKMEPSAGRPMDYQVSITVIEARQLVGLNMDPVVCVEVGDDKKYTSMKESTNCPYYNEYFVFDFHVSPDVMFDKIIKISVIHSKNLLRSGTLVGSFKMDVGTVYSQPEHQFHHKWAILSDPDDISSGLKGYVKCDVAVVGKGDNIKTPHKANETDEDDIEGNLLLPEGVPPERQWARFYVKIYRAEGLPRMNTSLMANVKKAFIGENKDLVDPYVQVFFAGQKGKTSVQKSSYEPLWNEQVVFTDLFPPLCKRMKVQIRDSDKVNDMAIGTHFIDLRKISNDGDKGFLPTLGPAWVNMYGSTRNYTLLDEHQDLNEGLGEGVSFRARLLLGLAVEILDTSNPELTSSTEVQVEQATPISESCAGKMEEFFLFGAFLEASMIDRRNGDKPITFEVTIGNYGNEIDGLSRPQRPQPRKEPGDEEEVDLIQNSSDDEASDGGDLASVSSTPPMRPLVTDRNYFHLPYLERKPCIYIKSWWPDQRRRLYNASIMDHIADKLEEGLNDVQEMIKTEKFYPERRLRGVLEELSCGCCRFLSLADKDQGHSSRTRLDRERLKFCMRELESMGQQARTLRAQVKRHTVRDKLRLCQNFLQKLRFLADEPQHSIPDIFIWMMSNNKRIAYARVPSKDLLFSIVEEETGKDCAKVKTLFLKLPGKRGFGSAGWTVQAKVELYLWLGLSKQRKDFLCGLPCGFQEVKAAQGLGLHAFPPVSLVYTKKQTFQLRAHMYQARSLFAADSSGLSDPFARVFFINQSQCTEVLNETLCPTWDQMLVFDNLELYGEAHELRDDPPIIVIEIYDQDSMGKADFMGRTFAKPLVKMADEAYCPPRFPPQLEYYQIYRGNATAGDLLAAFELLQIGPAGKADLPPINGPVDVDRGPIMPVPVGIRPVLSKYRVEVLFWGLRDLKRVNLAQVDRPRVDIECAGKGVQSSLIHNYKKNPNFNTLVKWFEVDLPENELLHPPLNIRVVDCRAFGRYTLVGSHAVSSLRRFIYRPPDHSAPSWNTTVRLLRRCRVLCNGGPSSHSTGEVVVNMEPEVPIKKLETMVKLDATSEAVVKVDVAEEEKEKKKKKGTAEEPEEEEPDESMLDWWSKYFASIDTMKEQLRQQEPSGIDLEEKEEVDNTEGLKGSMKGKEKARAAKEERRKKTQSSGSGQGSEAPEKKKPKIDELKVYPKELECEFDNFEDWLHTFNLLRGKTGDDEDGSTEEERIVGRFKGSLCVYKVPLPEDVSREAGYDPTYGMFQGIPSNDPINVLVRVYVVRATDLHPADINGKADPYIAIRLGKTDIRDKENYISKQLNPVFGKSFDIEASFPMESMLTVAVYDWDLVGTDDLIGETKIDLENRFYSKHRATCGIAQTYSTHGYNIWRDPMKPSQILTRLCKDSKVDGPHFGPPGRVKVANRVFTGPSEIEDENGQRKPTDEHVALSALRHWEDIPRAGCRLVPEHVETRPLLNPDKPGIEQGRLELWVDMFPMDMPAPGTPLDISPRKPKKYELRVIIWNTDEVVLEDDDFFTGEKSSDIFVRGWLKGQQEDKQDTDVHYHSLTGEGNFNWRYLFPFDYLAAEERIVISKKESMFSWDETEYKIPARLTLQIWDADHFSADDFLGAIELDLNRFPRGAKTAKQCTMEMATGEVDVPLVSIFKQKRVKGWWPLLARNENDEFELTGKVEAELHLLTAEEAEKNPVGLARNEPDPLEKPNRPDTAFVWFLNPLKSIKYLICTRYKWLIIKIVLALLGLLMLGLFLYSLPGYMVKKLLGA

SEQ ID NO: 24-53 - skipped (30 entries)

SEQ ID NO: 54 - DNA, 500 bp, Homo sapiens
  source 1..500: mol_type = other DNA
agacttgcccaaaaactctggcaaagttgaattgcttccaaaagttcaactttatcagaaggacctattccctacggaaactagctgaaggtctcctggcactctggatctcgtggaagggagccttcttcagggaacagagggagcgattaagtggtgaaaagcaaacagacctggaaaagttccctttctgagagtagcaacagaaagctctgcaaagactccctccaagctattggatcctcttgcttgggataaccacttgagtactcagataccaaaagaagagtggaaatcccaagagaagtcaccagaaaaaacagcttttaagaaaaaggatacacttttgtccctgaacgcttgtgaaagcaatctgacaatagcagcaattgaaaagggacaaaataagcccgaaatagaagtcacctgggcaaagcaaggtaggactgaaaggctgtgctctcaaaacccaccagtcttgaaacgcactcaacgggtga

SEQ ID NO: 55 - DNA, 500 bp, Homo sapiens
  source 1..500: mol_type = other DNA
aagtagtaggaaagggtgaatttacaaaggacgtaggactcaaagagtgagtttttccaagcagcagaaacctatttcttactaacttggataatttactgaaaaataatacacacaatcaagaaaaaaaaattcaggaagaaatagaaaagaaggaaaacttaatccaagagtgaatagttttgcctcagataactacagtgactggcactaagaatttctgaaagaaccttttcttactgagcactaggctgaaaatagaaggttacttgaacggggacttgactccagtacttcaagattttaggtactttgaaaattcaacaaatagaacaaagaaacacacagctactttctcaaaaaaaggggaggaagaaaacttggaaggcttgggaaatcaaaccaagcaaattgtagagaaattgactgacaccacaaggatatctcctaatacaagccagcagaattttgtcacgcaacgtagtaagagagctttgaaa

SEQ ID NO: 56 - DNA, 500 bp, Homo sapiens
  source 1..500: mol_type = other DNA
gttgactaaagattgaaccttattcaaagttagactctctttgttaaagacaaacaaaacttccaataattcagcaactaatagaaagactcaacttgtgagccactacttattaattgagaatagtcactcagtctggcaaaatatattagaaagtgacactgagtttaaaaaagtgacacctttgattctgaacagtgaactttgagactgaaaaactacagctttgaggctaaatacttgatcaaataaaactacttactcaaaaaactgagtgaaagtccaacagaaaaaagagggcccacttccaccagtgacacaaaatccagattgatcgttctttaagtgactattcttgccagaatcagcaaggtggatacaaaggactctgagaaagaactctctgaactctgggcaaggccccagtccaaagcaattagtatccttaggaccagaaaaatctgtggaaggtcagaatttcttgtctgagaaaaacaaag

SEQ ID NO: 57 - DNA, 500 bp, Homo sapiens
  source 1..500: mol_type = other DNA
caattcagactcccactagaagaaacagaacttgaaaaaaggataattgtggtgaacacctcaacccagtggtccaaaaactgaaaaactttgaccccgagcaccctcacacagatagactactgaaagaaggagaaaggggcacttactcagtctcccttatcagattgccttacgaggagtactagactccctcaagcaaatagatctcacttaccacttgcaaaggtatactactttcactctattagacctatatatctgaccagggtcctattccaagacaactcttctactcttccagcagactcttatagaaagaaagattctggggtccaagaaagcagtactttcttacaaggagccaaaaaaaataacctttctttagcacttctaaccttggagtgaactggtgatcaaagagaggttggctccctggggacaagtgccacaaattcagtcaactacaagaaagttgagaacactgttctcccgaaacc

SEQ ID NO: 58 - DNA, 1000 bp, Homo sapiens
  source 1..1000: mol_type = other DNA
agacttgcccaaaaactctggcaaagttgaattgcttccaaaagttcaactttatcagaaggacctattccctacggaaactagctgaaggtctcctggcactctggatctcgtggaagggagccttcttcagggaacagagggagcgattaagtggtgaaaagcaaacagacctggaaaagttccctttctgagagtagcaacagaaagctctgcaaagactccctccaagctattggatcctcttgcttgggataaccacttgagtactcagataccaaaagaagagtggaaatcccaagagaagtcaccagaaaaaacagcttttaagaaaaaggatacacttttgtccctgaacgcttgtgaaagcaatctgacaatagcagcaattgaaaagggacaaaataagcccgaaatagaagtcacctgggcaaagcaaggtaggactgaaaggctgtgctctcaaaacccaccagtcttgaaacgcactcaacgggtgaaagtagtaggaaagggtgaatttacaaaggacgtaggactcaaagagtgagtttttccaagcagcagaaacctatttcttactaacttggataatttactgaaaaataatacacacaatcaagaaaaaaaaattcaggaagaaatagaaaagaaggaaaacttaatccaagagtgaatagttttgcctcagataactacagtgactggcactaagaatttctgaaagaaccttttcttactgagcactaggctgaaaatagaaggttacttgaacggggacttgactccagtacttcaagattttaggtactttgaaaattcaacaaatagaacaaagaaacacacagctactttctcaaaaaaaggggaggaagaaaacttggaaggcttgggaaatcaaaccaagcaaattgtagagaaattgactgacaccacaaggatatctcctaatacaagccagcagaattttgtcacgcaacgtagtaagagagctttgaaa

SEQ ID NO: 59 - DNA, 127 bp, synthetic construct
  misc_feature 1..127: note = Description of Artificial Sequence: Synthetic polynucleotide
  source 1..127: mol_type = other DNA
cctgcaggcagctgcgcgctcgctcgctcactgaggccgcccgggcgtcgggcgacctttggtcgcccggcctcagtgagcgagcgagcgcgcagagagggagtggccaactccatcactaggggtt

SEQ ID NO: 60 - DNA, 141 bp, synthetic construct
  misc_feature 1..141: note = Description of Artificial Sequence: Synthetic polynucleotide
  source 1..141: mol_type = other DNA
aggaacccctagtgatggagttggccactccctctctgcgcgctcgctcgctcactgaggccgggcgaccaaaggtcgcccgacgcccgggctttgcccgggcggcctcagtgagcgagcgagcgcgcagctgcctgcagg

SEQ ID NO: 61-63 - skipped (3 entries)

SEQ ID NO: 64 - DNA, 82 bp, synthetic construct
  misc_feature 1..82: note = Description of Artificial Sequence: Synthetic oligonucleotide
  source 1..82: mol_type = other DNA
gtaagtatcaaggttacaagacaggtttaaggagaccaatagaaactgggcttgtcgagacagagaagactcttgcgtttct

SEQ ID NO: 65 - DNA, 51 bp, synthetic construct
  misc_feature 1..51: note = Description of Artificial Sequence: Synthetic oligonucleotide
  source 1..51: mol_type = other DNA
gataggcacctattggtcttactgacatccactttgcctttctctccacag

SEQ ID NO: 66-67 - skipped (2 entries)

SEQ ID NO: 68 - DNA, 240 bp, synthetic construct
  misc_feature 1..240: note = Description of Artificial Sequence: Synthetic polynucleotide
  source 1..240: mol_type = other DNA
gctgatcagcctcgactgtgccttctagttgccagccatctgttgtttgcccctcccccgtgccttccttgaccctggaaggtgccactcccactgtcctttcctaataaaatgaggaaattgcatcgcattgtctgagtaggtgtcattctattctggggggtggggtggggcaggacagcaagggggaggattgggaagacaatagcaggcatgctggggatgcggtgggctctatgg

SEQ ID NO: 69-71 - skipped (3 entries)

SEQ ID NO: 72 - DNA, 82 bp, synthetic construct
  misc_feature 1..82: note = Description of Artificial Sequence: Synthetic oligonucleotide
  source 1..82: mol_type = other DNA
gtgaggacgcaactggacggcgggggctggagggagggcctggttgtgagaaggtgtcacaaccccctttgtcatggcccga

SEQ ID NO: 73 - DNA, 45 bp, synthetic construct
  misc_feature 1..45: note = Description of Artificial Sequence: Synthetic oligonucleotide
  source 1..45: mol_type = other DNA
gctgtcccccagttgctgggttcactgacaccccctccttcgcag

SEQ ID NO: 74 - DNA, 82 bp, synthetic construct
  misc_feature 1..82: note = Description of Artificial Sequence: Synthetic oligonucleotide
  source 1..82: mol_type = other DNA
gtgcggcccaaggggtcggggctttgcctcatccagggctggctctctggggcccctcaggatcagggggctcaatcaggag

SEQ ID NO: 75 - DNA, 46 bp, synthetic construct
  misc_feature 1..46: note = Description of Artificial Sequence: Synthetic oligonucleotide
  source 1..46: mol_type = other DNA
gctagacccccttacccactgcccctggccaccccccaacccccag

SEQ ID NO: 76 - DNA, 49 bp, synthetic construct
  misc_feature 1..49: note = Description of Artificial Sequence: Synthetic oligonucleotide
  source 1..49: mol_type = other DNA
aataaaatatctttattttcattacatctgtgtgttggttttttgtgtg

SEQ ID NO: 77 - DNA, 48 bp, synthetic construct
  misc_feature 1..48: note = Description of Artificial Sequence: Synthetic oligonucleotide
  source 1..48: mol_type = other DNA
cggcaataaaaagacagaataaaacgcacggtgttgggtcgtttgttc

SEQ ID NO: 78-89 - skipped (12 entries)

SEQ ID NO: 90 - DNA, 497 bp, Homo sapiens
  source 1..497: mol_type = other DNA
agacttgcccaaaaactctggcaaagttgaattgcttccaaaagttcaactttatcagaaggacctattccctacggaaactagctgaaggtctcctggcactctggatctcgtggaagggagccttcttcagggaacagagggagcgattaagtggtgaaaagcaaacagacctggaaaagttccctttctgagagtagcaacagaaagctctgcaaagactccctccaagctattggatcctcttgcttgggataaccacttgagtactcagataccaaaagaagagtggaaatcccaagagaagtcaccagaaaaaacagcttttaagaaaaaggatacacttttgtccctgaacgcttgtgaaagcaatctgacaatagcagcaattgaaaagggacaaaataagcccgaaatagaagtcacctgggcaaagcaaggtaggactgaaaggctgtgctctcaaaacccaccagtcttgaaacgcactcaacggg

SEQ ID NO: 91 - DNA, 499 bp, Homo sapiens
  source 1..499: mol_type = other DNA
gtagtaggaaagggtgaatttacaaaggacgtaggactcaaagagtgagtttttccaagcagcagaaacctatttcttactaacttggataatttactgaaaaataatacacacaatcaagaaaaaaaaattcaggaagaaatagaaaagaaggaaaacttaatccaagagtgaatagttttgcctcagataactacagtgactggcactaagaatttctgaaagaaccttttcttactgagcactaggctgaaaatagaaggttacttgaacggggacttgactccagtacttcaagattttaggtactttgaaaattcaacaaatagaacaaagaaacacacagctactttctcaaaaaaaggggaggaagaaaacttggaaggcttgggaaatcaaaccaagcaaattgtagagaaattgactgacaccacaaggatatctcctaatacaagccagcagaattttgtcacgcaacgtagtaagagagctttgaaac

SEQ ID NO: 92 - DNA, 2523 bp, synthetic construct
  misc_feature 1..2523: note = Description of Artificial Sequence: Synthetic polynucleotide
  source 1..2523: mol_type = other DNA
atggccctgctgatccacctgaaaaccgtgtccgagctgagaggcagaggcgacagaatcgccaaagtgaccttccggggccagagcttctacagcagagtgctggaaaactgcgaggacgtggccgacttcgacgagacattcagatggcctgtggccagcagcatcgaccggaacgagatgctggaaatccaggtgttcaactacagcaaggtgttcagcaacaagctgatcggcaccttcagaatggtgctgcagaaagtggtggaagagtcccacgtggaagtgaccgacacactgatcgacgacaacaacgccatcatcaagaccagcctgtgtgtggaagtgcgctaccaggccacagatggcacagtcggctcttgggacgatggcgatttcctgggcgacgagagcctgcaagaggaagagaaggacagccaagagacagacggcctgctgcctggctctagaccttcttctagacctcctggcgagaagtcctttcggagagccggcagatctgtgttcagcgccatgaagctgggcaagaacagaagccacaaagaggaaccccagcggcctgatgaacctgccgttctggaaatggaagatctggaccacctggccatcagactcggcgacggacttgatcctgatagcgtgtcactggccagcgtgacagccctgaccaccaacgtgtccaacaagagaagcaagcccgacatcaagatggaacccagcgccggcagacccatggattaccaggtgtccatcaccgtgatcgaggccagacagctcgtgggcctgaacatggatcctgtcgtgtgcgtggaagtcggcgacgacaaaaagtacaccagcatgaaggaaagcacgaactgcccctactacaacgagtacttcgtgttcgactttcacgtgtccccagacgtgatgttcgacaagatcattaagatcagcgtgatccacagcaagaacctgctgagaagcggcacactcgtgggcagctttaagatggatgtgggcaccgtgtacagccagcctgagcaccagtttcaccacaagtgggccatcctgagcgaccccgatgatatcagctctggactgaagggctacgtgaagtgtgatgtggccgtcgtcggcaagggcgacaacatcaagacaccccacaaggccaacgaaaccgacgaggacgacatcgagggcaacctgttgctgcctgaaggcgtgccaccagaaagacagtgggcccgcttttacgtgaagatctacagagccgagggcctgcctcggatgaacacaagcctgatggctaacgtgaagaaggcctttatcggcgagaacaaggacctggtggacccctacgtgcaggttttctttgccggccagaaaggcaagacctccgtgcagaagtctagctacgagcccctgtggaacgaacaggtggtgttcaccgatctgttccctccactgtgcaagcggatgaaggtgcagattcgggacagcgacaaagtgaacgacgtggccatcggcacccacttcatcgacctgcggaagatcagcaacgacggcgacaagggcttcctgcctacacttggacctgcctgggtcaacatgtacggcagcaccagaaactacaccctgttggacgagcaccaggacctgaatgaaggactcggagagggcgtgtccttcagagccagactgctgctgggactcgccgtggaaatcgtggacaccagcaatcccgagctgaccagctctacagaggtgcaggttgagcaggccacacctatcagcgagtcttgcgccggaaagatggaagagttcttcctgttcggcgccttcctggaagccagcatgatcgacagacggaacggcgataagcccatcaccttcgaagtgaccatcggcaactacggcaacgaggtggacggcctgagcagacctcaaagaccccggcctagaaaagagcccggcgacgaggaagaggtggacctgattcagaacgccagcgacgatgaagcaggcgacgctggcgatctggcaagcgttagtagcacccctcctatgaggccccaagtgacagaccggaactactttcatctgccctacctggaacggaagccctgcatctacatcaagagctggtggcccgaccagcggcggagactgtacaacgccaatatcatggaccacattgccgacaagctggaagagggcctgaatgacatccaagagatgatcaagaccgagaagtcttaccccgagcggaggctgaggggagtcctggaagaactgagctgcggctgctgcagatttctgagcctggccgataaggaccagggccacagcagcagaaccagactggacagagagcggctgaagtcctgcatgagagaactggaaaacatgggccagcaggcccggatgctgagagcccaagtgaagagacacaccgtgcgggacaagctgaggctgtgccagaacttcctgcagaagctgagattcctggctgacgag

SEQ ID NO: 93 - DNA, 3471 bp, synthetic construct
  misc_feature 1..3471: note = Description of Artificial Sequence: Synthetic polynucleotide
  source 1..3471: mol_type = other DNA
ccccagcacagcatccccgatatcttcatctggatgatgagcaacaacaagcgcgtggcctacgccagagtgccctctaaggatctgctgttcagcatcgtggaagaggaaaccggcaaggactgcgccaaagtgaaaaccctgttcctgaagctgcccggcaagagaggctttggatctgccggatggacagtgcaggccaaggtggaactgtatctgtggctgggcctgagcaagcagcggaaagaattcctgtgtggcctgccttgcggcttccaagaagtgaaggctgcccaaggactgggcctgcatgcctttccacctgtgtctctggtgtacacaaagaagcaggccttccagctgcgggcccacatgtatcaggccagatctctgtttgccgccgacagctctggcctgtccgatccttttgccagagtgttcttcatcaaccagagccagtgcaccgaggtgctgaacgagacactgtgccctacctgggaccagatgctggtgttcgacaacctcgagctgtatggcgaggcccacgagctgagagatgaccctcctatcatcgtgatcgagatctacgaccaggacagcatgggcaaagccgacttcatgggcagaaccttcgccaagcctctggtcaagatggccgacgaggcctactgtcctcctagattccctccacagctggaatattaccagatctaccggggcaacgccacagccggcgatctgcttgctgcttttgagctgctgcagatcggccctgccggaaaggctgatctgcctccaatcaacggccccgtggatgtggatagaggccccattatgcctgtgcctatgggcatcagacccgtgctgagcaagtacagagtggaagtgctgttctggggcctgcgcgacctgaagagagtgaatctggctcaggtggacagacccagagtggacattgagtgtgccggcaagggcgtgcagtctagcctgatccacaactacaagaagaaccccaacttcaacaccctggtcaagtggttcgaggtggacctgcctgagaacgaactgctgcaccctccactgaacatcagagtggtggactgcagagccttcggcagatacacactcgtgggctctcatgccgtgtccagcctgcggagattcatctacagacctccagacagaagcgcccctagctggaacaccacagtccggctgctgagaagatgccgggtgctgtgtaatggcggcagcagcagtcatagcacaggcgaggtggtggtcaccatggaacctgaggtgcccatcaagaaactggaaaccatggtcaagctggacgccacctctgaggccgtggtcaaagtggacgtggccgaggaagagaaagagaagaaaaagaaaaaaaagggcaccgccgaggaacccgaagaggaagaacctgacgagagcatgctggactggtggtccaagtacttcgccagcatcgacaccatgaaggaacagctgagacagcaagagcccagcggcatcgacctcgaagagaaagaagaggtggacaacaccgagggcctgaagggcagcatgaagggcaaagagaaagccagagccgccaaagaggaaaagaagaagaaaacccagagcagcggcagcggccagggatctgaagcccctgaaaaaaagaagcccaagatcgacgagctgaaggtgtaccccaaagagctggaaagcgagttcgacaatttcgaggactggctgcacaccttcaacctgctgagaggcaagaccggcgacgatgaggatggcagcactgaagaggaacggatcgtgggcagattcaagggcagcctgtgcgtgtacaaggtgccactgcctgaggacgtgtccagagaggccggatacgatagcacctacggcatgttccagggcatccccagcaacgaccccatcaatgtgcttgtgcgggtgtacgttgtgcgggccacagatctgcaccccgccgatatcaatggcaaggccgatccttatatcgccatccggctgggcaagacagacatccgggacaaagagaactacatctccaagcagctgaaccccgtgttcggcaagagcttcgacatcgaggccagctttcccatggaatccatgctgaccgtggccgtgtacgactgggatctcgtgggcaccgatgatctgatcggcgagacaaagatcgacctggaaaaccggttctacagcaagcaccgggccacctgtggaatcgcccagacatatagcacacacggctacaacatctggcgggaccccatgaagcccagccagatcttgacacggctgtgcaaggatggcaaggtggacggccctcattttggcccacctggcagagtgaaggtggccaacagagtgtttacaggcccctccgagatcgaggacgagaacggccagagaaaacctaccgatgagcacgtggcactgctggccctgagacactgggaagatatccctagagccggctgcagactggtgcccgaacacgtggaaacaagacccctgctgaaccctgacaagcccggcattgaacagggcagactggaactgtgggtcgacatgttccccatggacatgcctgcacctggcacacccctggacatcagccctagaaagcctaagaaatacgagctgcgcgtgatcatctggaataccgacgaagtggtgctggaagatgacgacttcttcaccggcgagaagtccagcgacatcttcgtcagaggatggctgaaaggccagcaagaggacaagcaggacaccgacgtgcactaccatagcctgaccggcgagggcaacttcaattggcggtatctgttccccttcgactacctggccgccgaagagaagatcgtgatcagcaagaaagaatccatgttcagctgggacgagacagagtacaagatccccgccagactgaccctgcagatttgggacgccgatcacttcagcgccgacgattttctgggagccatcgagctggatctgaacagattccccagaggcgccaagaccgccaagcagtgtacaatggaaatggccaccggcgaagtggatgtgcccctggtgtccatcttcaagcagaaacgagtgaaaggctggtggcccctgctggccagaaatgagaacgacgagtttgagctgaccggaaaggtggaagccgagctgcatctgctgacagccgaagaggccgagaagaatcctgtgggactcgcccggaacgagcccgatcctctggaaaagcccaacagacccgataccgccttcgtgtggttcctgaatcctctgaagtccatcaagtacctgatctgtacccggtacaagtggctgatcatcaagatcgtgctggctctgctgggactgctgatgctcggcctgtttctgtacagcctgcctggctatatggtcaagaagctgctgggagcctaa

SEQ ID NO: 94 - DNA, 2520 bp, synthetic construct
  misc_feature 1..2520: note = Description of Artificial Sequence: Synthetic polynucleotide
  source 1..2520: mol_type = other DNA
atggccctgattgttcacctcaagactgtctcagagctccgaggcaaaggtgaccggattgccaaagtcactttccgagggcagtctttctactcccgggtcctggagaactgcgagggtgtggctgactttgatgagacgttccggtggccagtggccagcagcatcgaccggaatgaagtgttggagattcagattttcaactacagcaaagtcttcagcaacaagctgatagggaccttctgcatggtgctgcagaaagtggtggaggagaatcgggtagaggtgaccgacacgctgatggatgacagcaatgctatcatcaagaccagcctgagcatggaggtccggtatcaggccacagatggcactgtgggcccctgggatgatggagacttcctgggagatgaatccctccaggaggagaaggacagccaggagacagatgggctgctacctggttcccgacccagcacccggatatctggcgagaagagctttcgcagagcgggaaggagtgtgttctcggccatgaaactcggcaaaactcggtcccacaaagaggagccccaaagacaagatgagccagcagtgctggagatggaggacctggaccacctagccattcagctgggggatgggctggaccctgactccgtgtctctagcctcggtcaccgctctcaccagcaatgtctccaacaaacggtctaagccagatattaagatggagcccagtgctggaaggcccatggattaccaggtcagcatcacagtgattgaggctcggcagctggtgggcttgaacatggaccctgtggtgtgtgtggaggtgggtgatgacaagaaatacacgtcaatgaaggagtccacaaactgcccttactacaacgagtactttgtcttcgacttccatgtctctcctgatgtcatgtttgacaagatcatcaagatctcggttatccattctaagaacctgcttcggagcggcaccctggtgggttccttcaaaatggatgtggggactgtgtattcccagcctgaacaccagttccatcacaaatgggccatcctgtcagaccccgatgacatctctgctgggttgaagggttatgtaaagtgtgatgtcgctgtggtgggcaagggagacaacatcaagacaccccacaaggccaacgagacggatgaggacgacattgaagggaacttgctgctccccgagggcgtgccccccgaacggcagtgggcacggttctatgtgaaaatttaccgagcagagggactgccccggatgaacacaagcctcatggccaacgtgaagaaggcgttcatcggtgagaacaaggacctcgtcgacccctatgtgcaagtcttctttgctggacaaaagggcaaaacatcagtgcagaagagcagctatgagccgctatggaatgagcaggtcgtcttcacagacttgttccccccactctgcaaacgcatgaaggtgcagatccgggactctgacaaggtcaatgatgtggccatcggcacccacttcatcgacctgcgcaagatttccaacgatggagacaaaggcttcctgcctaccctcggtccagcctgggtgaacatgtacggctccacgcgcaactacacactgctggacgagcaccaggacttgaatgaaggcctgggggagggtgtgtccttccgggcccgcctcatgttgggactagctgtggagatcctggacacctccaacccagagctcaccagctccacggaggtgcaggtggagcaggccacgcctgtctcggagagctgcacagggagaatggaagaattttttctatttggagccttcttggaagcctcaatgattgaccggaaaaatggggacaagccaattacctttgaggtgaccataggaaactacggcaatgaagtcgatggtatgtcccggcccctgaggcctcggccccggaaagagcctggggatgaagaagaggtagacctgattcagaactccagtgacgatgaaggtgacgaagccggggacctggcctcggtgtcctccaccccacctatgcggccccagatcacggacaggaactatttccacctgccctacctggagcgcaagccctgcatctatatcaagagctggtggcctgaccagaggcggcgcctctacaatgccaacatcatggatcacattgctgacaagctggaagaaggcctgaatgatgtacaggagatgatcaaaacggagaagtcctacccggagcgccgcctgcggggtgtgctagaggaactcagctgtggctgccaccgcttcctctccctctcggacaaggaccagggccgctcgtcccgcaccaggctggatcgagagcgtcttaagtcctgtatgagggagttggagagcatgggacagcaggccaagagcctgagggctcaggtgaagcggcacactgttcgggacaagctgaggtcatgccagaactttctgcagaagctacgcttcctggcggatgag

SEQ ID NO: 95 - DNA, 3414 bp, synthetic construct
  misc_feature 1..3414: note = Description of Artificial Sequence: Synthetic polynucleotide
  source 1..3414: mol_type = other DNA
ccccagcacagcattccggatgtgttcatttggatgatgagcaacaacaaacgtatcgcctatgcccgcgtgccttccaaagacctgctcttctccatcgtggaggaggaactgggcaaggactgcgccaaagtcaagaccctcttcctgaagctgccagggaagaggggcttcggctcggcaggctggacagtacaggccaagctggagctctacctgtggctgggcctcagcaagcagcgaaaggacttcctgtgtggtctgccctgtggcttcgaggaggtcaaggcagcccaaggcctgggcctgcattcctttccgcccatcagcctagtctacaccaagaagcaagccttccagctccgagcacacatgtatcaggcccgaagcctctttgctgctgacagcagtgggctctctgatccctttgcccgtgtcttcttcatcaaccagagccaatgcactgaggttctaaacgagacactgtgtcccacctgggaccagatgctggtatttgacaacctggagctgtacggtgaagctcacgagttacgagatgatccccccatcattgtcattgaaatctacgaccaggacagcatgggcaaagccgacttcatgggccggaccttcgccaagcccctggtgaagatggcagatgaagcatactgcccacctcgcttcccgccgcagcttgagtactaccagatctaccgaggcagtgccactgccggagacctactggctgccttcgagctgctgcagattgggccatcagggaaggctgacctgccacccatcaatggcccagtggacatggacagagggcccatcatgcctgtgcccgtgggaatccggccagtgctcagcaagtaccgagtggaggtgctgttctggggcctgagggacctaaagagggtgaacctggcccaggtggaccgaccacgggtggacatcgagtgtgcaggaaagggggtacaatcctccctgattcacaattataagaagaaccccaacttcaacacgctggtcaagtggtttgaagtggacctcccggagaatgagctcctgcacccacccttgaacatccgagtggtagattgccgggcctttggacgatacaccctggtgggttcccacgcagtcagctcactgaggcgcttcatctaccgacctccagaccgctcagcccccaactggaacaccacaggggaggttgtagtaagcatggagcctgaggagccagttaagaagctggagaccatggtgaaactggatgcgacttctgatgctgtggtcaaggtggatgtggctgaagatgagaaggaaaggaagaagaagaaaaagaaaggcccgtcagaggagccagaggaggaagagcccgatgagagcatgctggattggtggtccaagtacttcgcctccatcgacacaatgaaggagcaacttcgacaacatgagacctctggaactgacttggaagagaaggaagagatggaaagcgctgagggcctgaagggaccaatgaagagcaaggagaagtccagagctgcaaaggaggagaaaaagaagaaaaaccagagccctggccctggccagggatcggaggctcctgagaagaagaaagccaagatcgatgagcttaaggtgtaccccaaggagctggaatcggagtttgacagctttgaggactggctgcacaccttcaacctgttgaggggcaagacgggagatgatgaggatggctccacagaggaggagcgcatagtaggccgattcaagggctccctctgtgtgtacaaagtgccactcccagaagatgtatctcgagaagctggctatgatcccacctatggaatgttccagggcatcccaagcaatgaccccatcaatgtgctggtccgaatctatgtggtccgggccacagacctgcacccggccgacatcaatggcaaagctgacccctatattgccatcaagttaggcaagaccgacatccgagacaaggagaactacatctccaagcagctcaaccctgtgtttgggaagtcctttgacattgaggcctccttccccatggagtccatgttgacagtggccgtgtacgactgggatctggtgggcactgatgacctcatcggagaaaccaagattgacctggaaaaccgcttctacagcaagcatcgcgccacctgcggcatcgcacagacctattccatacatggctacaatatctggagggaccccatgaagcccagccagatcctgacacgcctctgtaaagagggcaaagtggacggcccccactttggtccccatgggagagtgagggttgccaaccgtgtcttcacggggccttcagaaatagaggatgagaatggtcagaggaagcccacagatgagcacgtggcactgtctgctctgagacactgggaggacatcccccgggtgggctgccgccttgtgccggaacacgtggagaccaggccgctgctcaaccctgacaagccaggcattgagcagggccgcctggagctgtgggtggacatgttccccatggacatgccagcccctgggacacctctggatatatcccccaggaaacccaagaagtacgagctgcgggtcatcgtgtggaacacagacgaggtggtcctggaagacgatgatttcttcacgggagagaagtccagtgacatttttgtgagggggtggctgaagggccagcaggaggacaaacaggacacagatgtccactatcactccctcacgggggagggcaacttcaactggagatacctcttccccttcgactacctagcggccgaagagaagatcgttatgtccaaaaaggagtctatgttctcctgggatgagacggagtacaagatccctgcgcggctcaccctgcagatctgggacgctgaccacttctcggctgacgacttcctgggggctatcgagctggacctgaaccggttcccgaggggcgctaagacagccaagcagtgcaccatggagatggccaccggggaggtggacgtacccctggtttccatctttaaacagaaacgtgtcaaaggctggtggcccctcctggcccgcaatgagaatgatgagtttgagctcacaggcaaagtggaggcggagctacacctactcacggcagaggaggcagagaagaaccctgtgggcctggctcgcaatgaacctgatcccctagaaaaacccaaccggcctgacacggcattcgtctggttcctgaacccactcaaatctatcaagtacctcatctgcacccggtacaagtggctgatcatcaagatcgtgctggcgctgctggggctgctcatgctggccctcttcctttacagcctcccaggctacatggtcaagaagctcctaggggcctga

SEQ ID NO: 96 - DNA, 4744 bp, synthetic construct
  misc_feature 1..4744: note = Synthetic Polynucleotide
  source 1..4744: mol_type = other DNA
ttggccactccctctctgcgcgctcgctcgctcactgaggccgcccgggcaaagcccgggcgtcgggcgacctttggtcgcccggcctcagtgagcgagcgagcgcgcagagagggagtggccaactccatcactaggggttcctttgtcgacgcggccgcacgcgtgacattgattattgactagttattaatagtaatcaattacggggtcattagttcatagcccatatatggagttccgcgttacataacttacggtaaatggcccgcctggctgaccgcccaacgacccccgcccattgacgtcaataatgacgtatgttcccatagtaacgccaatagggactttccattgacgtcaatgggtggactatttacggtaaactgcccacttggcagtacatcaagtgtatcatatgccaagtacgccccctattgacgtcaatgacggtaaatggcccgcctggcattatgcccagtacatgaccttatgggactttcctacttggcagtacatctacgtattagtcatcgctattaccatgggtcgaggtgagccccacgttctgcttcactctccccatctcccccccctccccacccccaattttgtatttatttattttttaattattttgtgcagcgatgggggcggggggggggggggggcgcgcgccaggcggggcggggcggggcgaggggcggggcggggcgaggcggagaggtgcggcggcagccaatcagagcggcgcgctccgaaagtttccttttatggcgaggcggcggcggcggcggccctataaaaagcgaagcgcgcggcgggcgggagtcgctgcgttgccttcgccccgtgccccgctccgcgccgcctcgcgccgcccgccccggctctgactgaccgcgttactcccacaggtgagcgggcgggacggcccttctcctccgggctgtaattagcgcttggtttaatgacggctcgtttcttttctgtggctgcgtgaaagccttaaagggctccgggagggccctttgtgcgggggggagcggctcggggggtgcgtgcgtgtgtgtgtgcgtggggagcgccgcgtgcggcccgcgctgcccggcggctgtgagcgctgcgggcgcggcgcggggctttgtgcgctccgcgtgtgcgcgaggggagcgcggccgggggcggtgccccgcggtgcgggggggctgcgaggggaacaaaggctgcgtgcggggtgtgtgcgtgggggggtgagcagggggtgtgggcgcggcggtcgggctgtaacccccccctgcacccccctccccgagttgctgagcacggcccggcttcgggtgcggggctccgtgcggggcgtggcgcggggctcgccgtgccgggcggggggtggcggcaggtgggggtgccgggcggggcggggccgcctcgggccggggagggctcgggggaggggcgcggcggcccccggagcgccggcggctgtcgaggcgcggcgagccgcagccattgccttttatggtaatcgtgcgagagggcgcagggacttcctttgtcccaaatctgtgcggagccgaaatctgggaggcgccgccgcaccccctctagcgggcgcggggcgaagcggtgcggcgccggcaggaaggaaatgggcggggagggccttcgtgcgtcgccgcgccgccgtccccttctccctctccagcctcggggctgtccgcggggggacggctgccttcgggggggacggggcagggcggggttcggcttctggcgtgtgaccggcggctctagagcctctgctaaccatgttcatgccttcttctttttcctacagctcctgggcaacgtgctggttattgtgaccggtgccaccatggccttgctcatccacctcaagacagtctcggagctgcggggcaggggcgaccggatcgccaaagtgactttccgagggcaatccttctactctcgggtcctggagaactgtgaggatgtggctgactttgatgagacatttcggtggccggtggccagcagcatcgacagaaatgagatgctggagattcaggttttcaactacagcaaagtcttcagcaacaagctcatcgggaccttccgcatggtgctgcagaaggtggtagaggagagccatgtggaggtgactgacacgctgattgatgacaacaatgctatcatcaagaccagcctgtgcgtggaggtccggtatcaggccactgacggcacagtgggctcctgggacgatggggacttcctgggagatgagtctcttcaagaggaagagaaggacagccaagagacggatggactgctcccaggctcccggcccagctcccggcccccaggagagaagagcttccggagagccgggaggagcgtgttctccgccatgaagctcggcaaaaacaggtctcacaaggaggagccccaaagaccagatgaaccggcggtgctggagatggaagaccttgaccatctggccattcggctaggagatggactggatcccgactcggtgtctctagcctcagtcacagctctcaccactaatgtctccaacaagcgatctaagccagacattaagatggagccaagtgctgggcggcccatggattaccaggtcagcatcacggtgatcgaggcccggcagctggtgggcttgaacatggaccctgtggtgtgcgtggaggtgggtgacgacaagaagtacacatccatgaaggagtccactaactgcccctattacaacgagtacttcgtcttcgacttccatgtctctccggatgtcatgtttgacaagatcatcaagatttcggtgattcactccaagaacctgctgcgcagtggcaccctggtgggctccttcaaaatggacgtgggaaccgtgtactcgcagccagagcaccagttccatcacaagtgggccatcctgtctgaccccgatgacatctcctcggggctgaagggctacgtgaagtgtgacgttgccgtggtgggcaaaggggacaacatcaagacgccccacaaggccaatgagaccgacgaagatgacattgaggggaacttgctgctccccgagggggtgccccccgaacgccagtgggcccggttctatgtgaaaatttaccgagcagaggggctgccccgtatgaacacaagcctcatggccaatgtaaagaaggctttcatcggtgaaaacaaggacctcgtggacccctacgtgcaagtcttctttgctggccagaagggcaagacttcagtgcagaagagcagctatgagcccctgtggaatgagcaggtcgtctttacagacctcttccccccactctgcaaacgcatgaaggtgcagatccgagactcggacaaggtcaacgacgtggccatcggcacccacttcattgacctgcgcaagatttctaatgacggagacaaaggcttcctgcccacactgggcccagcctgggtgaacatgtacggctccacacgtaactacacgctgctggatgagcatcaggacctgaacgagggcctgggggagggtgtgtccttccgggcccggctcctgctgggcctggctgtggagatcgtagacacctccaaccctgagctcaccagctccacagaggtgcaggtggagcaggccacgcccatctcggagagctgtgcaggtaaaatggaagaattctttctctttggagccttcctggaggcctcaatgatcgaccggagaaacggagacaagcccatcacctttgaggtcaccataggcaactatgggaacgaagttgatggcctgtcccggccccagcggcctcggccccggaaggagccgggggatgaggaagaagtagacctgattcagaacgcaagtgatgacgaggccggtgatgccggggacctggcctcagtctcctccactccaccaatgcggccccaggtcaccgacaggaactacttccatctgccctacctggagcgaaagccctgcatctacatcaagagctggtggccggaccagcgccgccgcctctacaatgccaacatcatggaccacattgccgacaagctggaagaaggcctgaacgacatacaggagatgatcaaaacggagaagtcctaccctgagcgtcgcctgcggggcgtcctggaggagctgagctgtggctgctgccgcttcctctccctcgctgacaaggaccagggccactcatcccgcaccaggcttgaccgggagcgcctcaagtcctgcatgagggagctggaaaacatggggcagcaggccaggatgctgcgggcccaggtgaagcggcacacggtgcgggacaagctgaggctgtgccagaacttcctgcagaagctgcgcttcctggcggacgaggtaagtatcaaggttacaagacaggtttaaggagaccaatagaaactgggcttgtcgagacagagaagactcttgcgtttctgggattttgccgatttcggcctattggttaaaaaatgagctgatttaacaaaaatttaacgcgaattttaacaaaataagcttgaattcagctgacgtgcctcggaccgcctaggaggaacccctagtgatggagttggccactccctctctgcgcgctcgctcgctcactgaggccgggcgaccaaaggtcgcccgacgcccgggctttgcccgggcggcctcagtgagcgagcgagcgcgcagagagggagtggccaa

SEQ ID NO: 97 - DNA, 145 bp, synthetic construct
  misc_feature 1..145: note = Synthetic Polynucleotide
  source 1..145: mol_type = other DNA
ttggccactccctctctgcgcgctcgctcgctcactgaggccgcccgggcaaagcccgggcgtcgggcgacctttggtcgcccggcctcagtgagcgagcgagcgcgcagagagggagtggccaactccatcactaggggttcct

SEQ ID NO: 98 - DNA, 381 bp, synthetic construct
  misc_feature 1..381: note = Synthetic Polynucleotide
  source 1..381: mol_type = other DNA
gacattgattattgactagttattaatagtaatcaattacggggtcattagttcatagcccatatatggagttccgcgttacataacttacggtaaatggcccgcctggctgaccgcccaacgacccccgcccattgacgtcaataatgacgtatgttcccatagtaacgccaatagggactttccattgacgtcaatgggtggactatttacggtaaactgcccacttggcagtacatcaagtgtatcatatgccaagtacgccccctattgacgtcaatgacggtaaatggcccgcctggcattatgcccagtacatgaccttatgggactttcctacttggcagtacatctacgtattagtcatcgctattaccatgg

SEQ ID NO: 99 - DNA, 279 bp, synthetic construct
  misc_feature 1..279: note = Synthetic Polynucleotide
  source 1..279: mol_type = other DNA
gtcgaggtgagccccacgttctgcttcactctccccatctcccccccctccccacccccaattttgtatttatttattttttaattattttgtgcagcgatgggggcggggggggggggggggcgcgcgccaggcggggcggggcggggcgaggggcggggcggggcgaggcggagaggtgcggcggcagccaatcagagcggcgcgctccgaaagtttccttttatggcgaggcggcggcggcggcggccctataaaaagcgaagcgcgcggcgggcg

SEQ ID NO: 100 - DNA, 1013 bp, synthetic construct
  misc_feature 1..1013: note = Synthetic Polynucleotide
  source 1..1013: mol_type = other DNA
ggagtcgctgcgttgccttcgccccgtgccccgctccgcgccgcctcgcgccgcccgccccggctctgactgaccgcgttactcccacaggtgagcgggcgggacggcccttctcctccgggctgtaattagcgcttggtttaatgacggctcgtttcttttctgtggctgcgtgaaagccttaaagggctccgggagggccctttgtgcgggggggagcggctcggggggtgcgtgcgtgtgtgtgtgcgtggggagcgccgcgtgcggcccgcgctgcccggcggctgtgagcgctgcgggcgcggcgcggggctttgtgcgctccgcgtgtgcgcgaggggagcgcggccgggggcggtgccccgcggtgcgggggggctgcgaggggaacaaaggctgcgtgcggggtgtgtgcgtgggggggtgagcagggggtgtgggcgcggcggtcgggctgtaacccccccctgcacccccctccccgagttgctgagcacggcccggcttcgggtgcggggctccgtgcggggcgtggcgcggggctcgccgtgccgggcggggggtggcggcaggtgggggtgccgggcggggcggggccgcctcgggccggggagggctcgggggaggggcgcggcggcccccggagcgccggcggctgtcgaggcgcggcgagccgcagccattgccttttatggtaatcgtgcgagagggcgcagggacttcctttgtcccaaatctgtgcggagccgaaatctgggaggcgccgccgcaccccctctagcgggcgcggggcgaagcggtgcggcgccggcaggaaggaaatgggcggggagggccttcgtgcgtcgccgcgccgccgtccccttctccctctccagcctcggggctgtccgcggggggacggctgccttcgggggggacggggcagggcggggttcggcttctggcgtgtgaccggcggctctagagcctctgctaaccatgttcatgccttcttctttttcctacag

SEQ ID NO: 101 - DNA, 2523 bp, synthetic construct
  misc_feature 1..2523: note = Synthetic Polynucleotide
  source 1..2523: mol_type = other DNA
atggccttgctcatccacctcaagacagtctcggagctgcggggcaggggcgaccggatcgccaaagtgactttccgagggcaatccttctactctcgggtcctggagaactgtgaggatgtggctgactttgatgagacatttcggtggccggtggccagcagcatcgacagaaatgagatgctggagattcaggttttcaactacagcaaagtcttcagcaacaagctcatcgggaccttccgcatggtgctgcagaaggtggtagaggagagccatgtggaggtgactgacacgctgattgatgacaacaatgctatcatcaagaccagcctgtgcgtggaggtccggtatcaggccactgacggcacagtgggctcctgggacgatggggacttcctgggagatgagtctcttcaagaggaagagaaggacagccaagagacggatggactgctcccaggctcccggcccagctcccggcccccaggagagaagagcttccggagagccgggaggagcgtgttctccgccatgaagctcggcaaaaacaggtctcacaaggaggagccccaaagaccagatgaaccggcggtgctggagatggaagaccttgaccatctggccattcggctaggagatggactggatcccgactcggtgtctctagcctcagtcacagctctcaccactaatgtctccaacaagcgatctaagccagacattaagatggagccaagtgctgggcggcccatggattaccaggtcagcatcacggtgatcgaggcccggcagctggtgggcttgaacatggaccctgtggtgtgcgtggaggtgggtgacgacaagaagtacacatccatgaaggagtccactaactgcccctattacaacgagtacttcgtcttcgacttccatgtctctccggatgtcatgtttgacaagatcatcaagatttcggtgattcactccaagaacctgctgcgcagtggcaccctggtgggctccttcaaaatggacgtgggaaccgtgtactcgcagccagagcaccagttccatcacaagtgggccatcctgtctgaccccgatgacatctcctcggggctgaagggctacgtgaagtgtgacgttgccgtggtgggcaaaggggacaacatcaagacgccccacaaggccaatgagaccgacgaagatgacattgaggggaacttgctgctccccgagggggtgccccccgaacgccagtgggcccggttctatgtgaaaatttaccgagcagaggggctgccccgtatgaacacaagcctcatggccaatgtaaagaaggctttcatcggtgaaaacaaggacctcgtggacccctacgtgcaagtcttctttgctggccagaagggcaagacttcagtgcagaagagcagctatgagcccctgtggaatgagcaggtcgtctttacagacctcttccccccactctgcaaacgcatgaaggtgcagatccgagactcggacaaggtcaacgacgtggccatcggcacccacttcattgacctgcgcaagatttctaatgacggagacaaaggcttcctgcccacactgggcccagcctgggtgaacatgtacggctccacacgtaactacacgctgctggatgagcatcaggacctgaacgagggcctgggggagggtgtgtccttccgggcccggctcctgctgggcctggctgtggagatcgtagacacctccaaccctgagctcaccagctccacagaggtgcaggtggagcaggccacgcccatctcggagagctgtgcaggtaaaatggaagaattctttctctttggagccttcctggaggcctcaatgatcgaccggagaaacggagacaagcccatcacctttgaggtcaccataggcaactatgggaacgaagttgatggcctgtcccggccccagcggcctcggccccggaaggagccgggggatgaggaagaagtagacctgattcagaacgcaagtgatgacgaggccggtgatgccggggacctggcctcagtctcctccactccaccaatgcggccccaggtcaccgacaggaactacttccatctgccctacctggagcgaaagccctgcatctacatcaagagctggtggccggaccagcgccgccgcctctacaatgccaacatcatggaccacattgccgacaagctggaagaaggcctgaacgacatacaggagatgatcaaaacggagaagtcctaccctgagcgtcgcctgcggggcgtcctggaggagctgagctgtggctgctgccgcttcctctccctcgctgacaaggaccagggccactcatcccgcaccaggcttgaccgggagcgcctcaagtcctgcatgagggagctggaaaacatggggcagcaggccaggatgctgcgggcccaggtgaagcggcacacggtgcgggacaagctgaggctgtgccagaacttcctgcagaagctgcgcttcctggcggacgag

SEQ ID NO: 102 - DNA, 82 bp, synthetic construct; identical to SEQ ID NO: 64
  misc_feature 1..82: note = Synthetic Polynucleotide
  source 1..82: mol_type = other DNA

SEQ ID NO: 103 - DNA, 77 bp, synthetic construct
  source 1..77: mol_type = other DNA
gggattttgccgatttcggcctattggttaaaaaatgagctgatttaacaaaaatttaacgcgaattttaacaaaat

SEQ ID NO: 104 - DNA, 145 bp, synthetic construct
  misc_feature 1..145: note = Synthetic Polynucleotide
  source 1..145: mol_type = other DNA
aggaacccctagtgatggagttggccactccctctctgcgcgctcgctcgctcactgaggccgggcgaccaaaggtcgcccgacgcccgggctttgcccgggcggcctcagtgagcgagcgagcgcgcagagagggagtggccaa

SEQ ID NO: 105 - DNA, 4195 bp, synthetic construct
  misc_feature 1..4195: note = Synthetic Polynucleotide
  source 1..4195: mol_type = other DNA
ttggccactccctctctgcgcgctcgctcgctcactgaggccgcccgggcaaagcccgggcgtcgggcgacctttggtcgcccggcctcagtgagcgagcgagcgcgcagagagggagtggccaactccatcactaggggttcctttgtcgacgcggccgcacgcgtgggattttgccgatttcggcctattggttaaaaaatgagctgatttaacaaaaatttaacgcgaattttaacaaaatgataggcacctattggtcttactgacatccactttgcctttctctccacagccccagcacagcattcccgacatcttcatctggatgatgagcaacaacaagcgtgtcgcctatgcccgtgtgccctccaaggacctgctcttctccatcgtggaggaggagactggcaaggactgcgccaaggtcaagacgctcttccttaagctgccagggaagcggggcttcggctcggcaggctggacagtgcaggccaaggtggagctgtacctgtggctgggcctcagcaaacagcgcaaggagttcctgtgcggcctgccctgtggcttccaggaggtcaaggcagcccagggcctgggcctgcatgccttcccacccgtcagcctggtctacaccaagaagcaggcgttccagctccgagcgcacatgtaccaggcccgcagcctctttgccgccgacagcagcggactctcagacccctttgcccgcgtcttcttcatcaatcagagtcagtgcacagaggtgctgaatgagaccctgtgtcccacctgggaccagatgctggtgttcgacaacctggagctctatggtgaagctcatgagctgagggacgatccgcccatcattgtcattgaaatctatgaccaggattccatgggcaaagctgacttcatgggccggaccttcgccaaacccctggtgaagatggcagacgaggcgtactgcccaccccgcttcccacctcagctcgagtactaccagatctaccgtggcaacgccacagctggagacctgctggcggccttcgagctgctgcagattggaccagcagggaaggctgacctgccccccatcaatggcccggtggacgtggaccgaggtcccatcatgcccgtgcccatgggcatccggcccgtgctcagcaagtaccgagtggaggtgctgttctggggcctacgggacctaaagcgggtgaacctggcccaggtggaccggccacgggtggacatcgagtgtgcagggaagggggtgcagtcgtccctgatccacaattataagaagaaccccaacttcaacaccctcgtcaagtggtttgaagtggacctcccagagaacgagctgctgcacccgcccttgaacatccgtgtggtggactgccgggccttcggtcgctacacactggtgggctcccatgccgtcagctccctgcgacgcttcatctaccggcccccagaccgctcggcccccagctggaacaccacggtcaggcttctccggcgctgccgtgtgctgtgcaatgggggctcctcctctcactccacaggggaggttgtggtgactatggagccagaggtacccatcaagaaactggagaccatggtgaagctggacgcgacttctgaagctgttgtcaaggtggatgtggctgaggaggagaaggagaagaagaagaagaagaagggcactgcggaggagccagaggaggaggagccagacgagagcatgctggactggtggtccaagtactttgcctccattgacaccatgaaggagcaacttcgacaacaagagccctctggaattgacttggaggagaaggaggaagtggacaataccgagggcctgaaggggtcaatgaagggcaaggagaaggcaagggctgccaaagaggagaagaagaagaaaactcagagctctggctctggccaggggtccgaggcccccgagaagaagaaacccaagattgatgagcttaaggtataccccaaagagctggagtccgagtttgataactttgaggactggctgcacactttcaacttgcttcggggcaagaccggggatgatgaggatggctccaccgaggaggagcgcattgtgggacgcttcaagggctccctctgcgtgtacaaagtgccactcccagaggacgtgtcccgggaagccggctacgactccacctacggcatgttccagggcatcccgagcaatgaccccatcaatgtgctggtccgagtctatgtggtccgggccacggacctgcaccctgctgacatcaacggcaaagctgacccctacatcgccatccggctaggcaagactgacatccgcgacaaggagaactacatctccaagcagctcaaccctgtctttgggaagtcctttgacatcgaggcctccttccccatggaatccatgctgacggtggctgtgtatgactgggacctggtgggcactgatgacctcattggggaaaccaagatcgacctggagaaccgcttctacagcaagcaccgcgccacctgcggcatcgcccagacctactccacacatggctacaatatctggcgggaccccatgaagcccagccagatcctgacccgcctctgcaaagacggcaaagtggacggcccccactttgggccccctgggagagtgaaggtggccaaccgcgtcttcactgggccctctgagattgaggacgagaacggtcagaggaagcccacagacgagcatgtggcgctgttggccctgaggcactgggaggacatcccccgcgcaggctgccgcctggtgccagagcatgtggagacgaggccgctgctcaaccccgacaagccgggcatcgagcagggccgcctggagctgtgggtggacatgttccccatggacatgccagcccctgggacgcctctggacatctcacctcggaagcccaagaagtacgagctgcgggtcatcatctggaacacagatgaggtggtcttggaggacgacgacttcttcacaggggagaagtccagtgacatcttcgtgagggggtggctgaagggccagcaggaggacaagcaggacacagacgtccactaccactccctcactggcgagggcaacttcaactggcgctacctgttccccttcgactacctggcggcggaggagaagatcgtcatctccaagaaggagtccatgttctcctgggacgagaccgagtacaagatccccgcgcggctcaccctgcagatctgggatgcggaccacttctccgctgacgacttcctgggggccatcgagctggacctgaaccggttcccgcggggcgcaaagacagccaagcagtgcaccatggagatggccaccggggaggtggacgtgcccctcgtgtccatcttcaagcaaaagcgcgtcaaaggctggtggcccctcctggcccgcaatgagaacgatgagtttgagctcacgggcaaggtggaggctgagctgcatttactgacagcagaggaggcagagaagaacccagtgggcctggcccgcaatgaacctgaccccctagagaaacccaaccggcccgacacggccttcgtctggttcctcaaccctctcaagtccatcaagtacctcatctgcacccggtacaagtggctcatcatcaagatcgtgctggcgctgttggggctgctcatgttggggctcttcctctacagcctccctggctacatggtcaaaaagctccttggggcatgaactagtgctgatcagcctcgactgtgccttctagttgccagccatctgttgtttgcccctcccccgtgccttccttgaccctggaaggtgccactcccactgtcctttcctaataaaatgaggaaattgcatcgcattgtctgagtaggtgtcattctattctggggggtggggtggggcaggacagcaagggggaggattgggaagacaatagcaggcatgctggggatgcggtgggctctatggaagcttgaattcagctgacgtgcctcggaccgcctaggaggaacccctagtgatggagttggccactccctctctgcgcgctcgctcgctcactgaggccgggcgaccaaaggtcgcccgacgcccgggctttgcccgggcggcctcagtgagcgagcgagcgcgcagagagggagtggccaa

SEQ ID NO: 106 - DNA, 51 bp, synthetic construct; identical to SEQ ID NO: 65
  misc_feature 1..51: note = Synthetic Polynucleotide
  source 1..51: mol_type = other DNA

SEQ ID NO: 107 - DNA, 3468 bp, synthetic construct
  misc_feature 1..3468: note = Synthetic Polynucleotide
  source 1..3468: mol_type = other DNA
ccccagcacagcattcccgacatcttcatctggatgatgagcaacaacaagcgtgtcgcctatgcccgtgtgccctccaaggacctgctcttctccatcgtggaggaggagactggcaaggactgcgccaaggtcaagacgctcttccttaagctgccagggaagcggggcttcggctcggcaggctggacagtgcaggccaaggtggagctgtacctgtggctgggcctcagcaaacagcgcaaggagttcctgtgcggcctgccctgtggcttccaggaggtcaaggcagcccagggcctgggcctgcatgccttcccacccgtcagcctggtctacaccaagaagcaggcgttccagctccgagcgcacatgtaccaggcccgcagcctctttgccgccgacagcagcggactctcagacccctttgcccgcgtcttcttcatcaatcagagtcagtgcacagaggtgctgaatgagaccctgtgtcccacctgggaccagatgctggtgttcgacaacctggagctctatggtgaagctcatgagctgagggacgatccgcccatcattgtcattgaaatctatgaccaggattccatgggcaaagctgacttcatgggccggaccttcgccaaacccctggtgaagatggcagacgaggcgtactgcccaccccgcttcccacctcagctcgagtactaccagatctaccgtggcaacgccacagctggagacctgctggcggccttcgagctgctgcagattggaccagcagggaaggctgacctgccccccatcaatggcccggtggacgtggaccgaggtcccatcatgcccgtgcccatgggcatccggcccgtgctcagcaagtaccgagtggaggtgctgttctggggcctacgggacctaaagcgggtgaacctggcccaggtggaccggccacgggtggacatcgagtgtgcagggaagggggtgcagtcgtccctgatccacaattataagaagaaccccaacttcaacaccctcgtcaagtggtttgaagtggacctcccagagaacgagctgctgcacccgcccttgaacatccgtgtggtggactgccgggccttcggtcgctacacactggtgggctcccatgccgtcagctccctgcgacgcttcatctaccggcccccagaccgctcggcccccagctggaacaccacggtcaggcttctccggcgctgccgtgtgctgtgcaatgggggctcctcctctcactccacaggggaggttgtggtgactatggagccagaggtacccatcaagaaactggagaccatggtgaagctggacgcgacttctgaagctgttgtcaaggtggatgtggctgaggaggagaaggagaagaagaagaagaagaagggcactgcggaggagccagaggaggaggagccagacgagagcatgctggactggtggtccaagtactttgcctccattgacaccatgaaggagcaacttcgacaacaagagccctctggaattgacttggaggagaaggaggaagtggacaataccgagggcctgaaggggtcaatgaagggcaaggagaaggcaagggctgccaaagaggagaagaagaagaaaactcagagctctggctctggccaggggtccgaggcccccgagaagaagaaacccaagattgatgagcttaaggtataccccaaagagctggagtccgagtttgataactttgaggactggctgcacactttcaacttgcttcggggcaagaccggggatgatgaggatggctccaccgaggaggagcgcattgtgggacgcttcaagggctccctctgcgtgtacaaagtgccactcccagaggacgtgtcccgggaagccggctacgactccacctacggcatgttccagggcatcccgagcaatgaccccatcaatgtgctggtccgagtctatgtggtccgggccacggacctgcaccctgctgacatcaacggcaaagctgacccctacatcgccatccggctaggcaagactgacatccgcgacaaggagaactacatctccaagcagctcaaccctgtctttgggaagtcctttgacatcgaggcctccttccccatggaatccatgctgacggtggctgtgtatgactgggacctggtgggcactgatgacctcattggggaaaccaagatcgacctggagaaccgcttctacagcaagcaccgcgccacctgcggcatcgcccagacctactccacacatggctacaatatctggcgggaccccatgaagcccagccagatcctgacccgcctctgcaaagacggcaaagtggacggcccccactttgggccccctgggagagtgaaggtggccaaccgcgtcttcactgggccctctgagattgaggacgagaacggtcagaggaagcccacagacgagcatgtggcgctgttggccctgaggcactgggaggacatcccccgcgcaggctgccgcctggtgccagagcatgtggagacgaggccgctgctcaaccccgacaagccgggcatcgagcagggccgcctggagctgtgggtggacatgttccccatggacatgccagcccctgggacgcctctggacatctcacctcggaagcccaagaagtacgagctgcgggtcatcatctggaacacagatgaggtggtcttggaggacgacgacttcttcacaggggagaagtccagtgacatcttcgtgagggggtggctgaagggccagcaggaggacaagcaggacacagacgtccactaccactccctcactggcgagggcaacttcaactggcgctacctgttccccttcgactacctggcggcggaggagaagatcgtcatctccaagaaggagtccatgttctcctgggacgagaccgagtacaagatccccgcgcggctcaccctgcagatctgggatgcggaccacttctccgctgacgacttcctgggggccatcgagctggacctgaaccggttcccgcggggcgcaaagacagccaagcagtgcaccatggagatggccaccggggaggtggacgtgcccctcgtgtccatcttcaagcaaaagcgcgtcaaaggctggtggcccctcctggcccgcaatgagaacgatgagtttgagctcacgggcaaggtggaggctgagctgcatttactgacagcagaggaggcagagaagaacccagtgggcctggcccgcaatgaacctgaccccctagagaaacccaaccggcccgacacggccttcgtctggttcctcaaccctctcaagtccatcaagtacctcatctgcacccggtacaagtggctcatcatcaagatcgtgctggcgctgttggggctgctcatgttggggctcttcctctacagcctccctggctacatggtcaaaaagctccttggggca

SEQ ID NO: 108 - DNA, 225 bp, synthetic construct
  misc_feature 1..225: note = Synthetic Polynucleotide
  source 1..225: mol_type = other DNA
ctgtgccttctagttgccagccatctgttgtttgcccctcccccgtgccttccttgaccctggaaggtgccactcccactgtcctttcctaataaaatgaggaaattgcatcgcattgtctgagtaggtgtcattctattctggggggtggggtggggcaggacagcaagggggaggattgggaagacaatagcaggcatgctggggatgcggtgggctctatgg

SEQ ID NO: 109 - protein, 736 aa, synthetic construct
  REGION 1..736: note = Synthetic Polypeptide
MAADGYLPDWLEDNLSEGIREWWDLKPGAPKPKANQQKQDDGRGLVLPGYKYLGPFNGLDKGEPVNAADAAALEHDKAYDQQLKAGDNPYLRYNHADAEFQERLQEDTSFGGNLGRAVFQAKKRVLEPLGLVEEGAKTAPGKKRPVEQSPQEPDSSSGIGKKGQQPARKRLNFGQTGDSESVPDPQPLGEPPAAPSGVGSNTMAAGGGAPMADNNEGADGVGNASGNWHCDSTWLGDRVITTSTRTWALPTYNNHLYKQISSQSGGSTNDNTYFGYSTPWGYFDFNRFHCHFSPRDWQRLINNNWGFRPKKLNFKLFNIQVKEVTTNDGTTTIANNLTSTVQVFTDSEYQLPYVLGSAHQGCLPPFPADVFMIPQYGYLTLNNGSQAVGRSSFYCLEYFPSQMLRTGNNFQFSYTFEDVPFHSSYAHSQSLDRLMNPLIDQYLYYLSRTQTTSGTAGNRTLQFSQAGPSSMANQAKNWLPGPCYRQQRVSKTTNQNNNSNFAWTGATKYHLNGRDSLVNPGPAMATHKDDEDKFFPMSGVLIFGKQGAGNSNVDLDNVMITNEEEIKTTNPVATEEYGTVATNLQSANTAPATGTVNSQGALPGMVWQDRDVYLQGPIWAKIPHTDGHFHPSPLMGGFGLKHPPPQILIKNTPVPANPPTTFSPAKFASFITQYSTGQVSVEIEWELQKENSKRWNPEIQYTSNYNKSTNVDFAVDTNGVYSEPRPIGTRYLTRNL

SEQ ID NO: 110 - DNA, 50 bp, synthetic construct
  misc_feature 1..50: note = Synthetic Polynucleotide
  source 1..50: mol_type = other DNA
ataggcacctattggtcttactgacatccactttgcctttctctccacag
